United States Patent Application Publication US 2026/0191916 A1 - sequence listing, part 70

SEQ ID NO: 458 - DNA, 3280281 bp, Bacteroides stercoris (residues 1,640,142-3,280,281 of 3,280,281)
  source 1..3280281: mol_type = genomic DNA
atacaagtgagccattcttttggttggtgagagatggtggaacaagtctatgctttattggtccaagcatggaaaaacttttttcattagagagcattcggtttgctgttatgaaagaaccactcgcaaacatatcgaatattgtctattggcccgattgcaatgccaacaagtatttttattgggatggagcacatcttcaaaaagtatccaaatataagattatttcaatattcaataatatttggggaagccggatacagcaactttccgttcaatatccagaagagtacgctgttataaatactccattaaaattaaaaatgtcccctgaaatatcggagcgtgtaaaagaggttaagaatattgcctcggagttgcaagattcaagttttgaggattgcctgaaaagactacaaaaatgggatagatatgctgttgaccaacatattgaaatatatggcgattttgccaaaaacagttttgaattttctgaggtggtaaatggagaacataaaatttgcggcggaattattatgtctccaaatgcgactgaaaaacgttggaacattcatacataaataaatgcaacatgaactactcgattaatcccaagctcaatgctgttatgaagagtattgagcttcaactattgtctaaagggacggacaagcaagaggcccttcagattattaggcaatatataaaagcatttcccaaagaaccggattataacctggcgcaatatggcggcatgcttgtttctccttatgacgtgcgagagttgaatatccaatgcggctacagtgtcgcttctcagaataatatttctgatgaaagaatctggtacgaatacttgcttcgagtgggactggttgcaagggaacttataaaaacaaatggcttatgactataatatcagaaataccacttcggaactttcaattttggagcggcggtaaggaccgggctgaaaaatgtacggatgaacaactggatgaaattgaatccatgatgaaggatattgttcccgaaaatgggtggactgaagctgaagtgaatgattttttctggtttgaatttgatactattgcgaattggcttggttacaagggcgaagaatactttgatgctggagttactgaatctgatgtacaagatgcagaagattggttcaactgtattttaaatgcaaatgaaatgattgacattgcaaatttagacaggaatgattatatctatcgggatgaggacggggaatatgtattggatgaagatttggtatacgatgatttctcggactggtggagtaatatgaacgatattgaaaaagtaaaagagtatcgtaagtatgagtaaagcgttatggtgaaaatccgggttcgattcccggaacgctgcatttaattagttgtttccatgtgtgttattcgacacgttttatgtttgaagggtggcgcgatcagaataggttaattctggttgcgcctttttctttaaagttaaagcgagttaatctttaaaaagtggacaactatggacaccatcaaaaactattcataaacaaaaataaaaaagggaatatgcaaaaagaactgttaacaattgaatttcgttacaacgacaggccatctggcatttgtccaacaacatcatgtaaaaagataatcactataggcatatttgatagtttggaagaagctgttagggctggcaacgaaacattaaaaacattgtcaaagcattttcaagtaagagacgatgaccgtttcaaggttcatggcttatttggcaacccggacaggatagtgacaaatacctgctaccctaccaatgggattgtatattttgccagaataacacctttgaagttcacctgcctttctgaaaccattgcagaagcatttagagcacatgaaagatataagcaatattatcaagaaatagatgaggaatcatgaatgttatagtttcaaataacaagcgcacactctctttgcaagtacatcatgtagatgtcagcaattccattgaattacattttccaaacgaaaaccagtcttttgatgcctttcaaaaacttcgtgaaataggtgtgaaatgttttcatactggtaaaaacgctccttgtggggcttctgtaatgatgtattcttatggtaataatatccaacttcaaataaagtagtaaaatggaagaaaagaggtatataaatattgataacatggcagcacgcctttaccaagttcttaaagatgcgcgtgaaagcatgattgatgatgaaaataaagtttttatcatggagagcttttcagatgagcttctggaagaagagagctacgaaatggcttggcggtttaattcaaatatgaaggaatatctgcacaagccggaccatagattatgtggtaatttcaataatattgattatgactatccttatcatatctatggaaaggttacatacgatgcacctcttgtaaatgccatgattgccagactggatgacaatgaagacagcaaactggctaacgaggaccgtaactttcttgttgattggttatttgaaacttttggaacatggggaatctcttataactttcaggatgaaatatccgaaactttgtatgttgaatttgaaaatcaatgaccttagaagtaatcaaatatgatgcacgaagaataccaagaaaaaggagtaacctatatccggatcaacaaaaccaaagcacgtgtcaaatataatgaaggcaaaactatatacctgattcaggacatgatgcgcctaccgaatgtgtggaaaaagccttgtccaatccataaagatgggctatcgtccattggtcgtgagtttgatgaccatgtgaaagacttccagtactataactgtgattctcaacgtgggcatggtataaaatatttcattaagcaagaagaattgtaatacatctaatatgaaaataatagcattacaactatatacttttgatgaattgtcggaagaggtacaaaaagaaattgttgagcgtgaacgctggaatataatggatcagtgtatggaggtttgcggttcagattatgtaaagtctttagatgctttcacgaaattgacagataccatgctttgtggttgggaggttggttattgtggatataactttaatttaaaatatagtgacagtttaatgtttgaatgtcctgttgattgtgataaggatatttatgcagagaatttgtgtggtaagttgctgttccgatatgtcaataataatattataccatatattacacaaggcaaatattattcatctttaggtaaagatataaatgaaaaatacactaacaaatacagacgaagccgtattatcaaatctgtaggtgatgattgtccactaacaggcatgtgttacgatttctacttgcttaaacctatcattaaatattataaaacttggtgtagttatccaaataatttctcgcttatagacttaatagaacaatgttatgatagttttttcaaatgctggcatgaagaatataagtattgggccaatgatgaaaatgcaatccgggaagaattgcataataaccaatatgaagacagactgtattatgaagacggaaaggtgtacgatgcagtttagttcaaatataaatacaagatataattatgccacgtttaaagggaacatataatattcctgactgggccttgtgtccgttggaatatgggataaattcggatgaatatggcttgacagatgaagacattgcccaaatcaaagacttccaggagaatgtaattggtggagggtactatatggatattcattgggaagactgcaacgaatttaatacacatcctcagtttggattgcctgcaaagacatatgaggttgatttttatattgattagctatgatgaaaccaattaaaacaatataaatatgaaaaagaaatttactcctgaaaatattcaggaacttaaagagaatcaaatatttgtttttggcagtaatatgaacggcaaccatgccggtggagcagccagattagcagttgagaaattcggtgcaatcatgggacaagccgaaggattgcaagggcaatcctatgctattcctacgctgaatgaagatatggagaaagtcacagaaaaagatttgataacctatttgggtaacttgcggaattttgccaacgaacatcctgaaaaggagtttcttcttaccgccattgggacgggaatagcggggtttgatacaaattatatggcatatatggttctcagggcaaaccttcctggtaatgttactatcccggaagaattcagtaaaataaaagggttcaagggcttcaatcctgatatgacttgcagggattttaaatatgaagagggaaaagattacgaagaacaaggtgatataagcgcttgtagtaatggtttccattactgtcttcatcccttagatgtatttggctattatccccctgcaaacattggtatgaacaagttccatgaagttgagggaagtggggatatggatgttgatacagatgataccaaaattgcttgctcaaaaatccacataggagcagagttaagtattaaaagtattgttgatgcggcaatcaagttcactttcagcaaatgtaagtggataaaggaaaatattgctaccggctaccaaggtgctgcatcagctaccggcgactatggtgctgcatcagctactggcgactatggtgctgcatcagctaccggctaccaaggtgctgcatcagctaccggctaccaaggtgctgcatcagctaccggctaccaaggtgctgcatcagctaccggctaccaaggtgctgcatcagctaccggctaccaaggtgctgcatcagctactggcaaccatggtgctgcatcagctactggcaactatggtgctgcatcagctaccggctaccaaggtgctgcatcagctaccggctaccaaggtgctgcatcagctaccggcgactatggtgctgcatcagctactggcgactatggtgctgcatcagctaccggctaccaaggtgctgcatcagctaccggctaccaaggtgctgcatcagctactggcaaccatggtgctgcatcagctaccggctaccaaggtgctgcatcagctaccggctaccaaggtgctgcatcagctactggtaaagaaagcatagcccttgctgccggaaaggattgcaaggcaaagggagcattaggatgctggattgtgcttactgaacgtggagaatgggacgggaacacttatcctatcatttcagtcaaagcattcaaagtggatggtaagtcaatcaaagagaatactttctattctttagtgaatggagaggcagtggaaatgaaataacaatttattccagccgcatcaaaggtagtgttattaccgtactaaaagccgtgagagaagcgaagtgcacatcgttttaataattacgtatgggaataatatatgctgtaccgtgaaacaaatgctgctgaaatagaatgatataataaagtaaattaattgtgaagttattatatgaaaacatcaaaatcattccatcaagagtacattgagaaagccaaaaaactaatccatgaaatccttgaagataaaaaagagtacgatgactggactcaaatttgtttttccatgcaaaatgcagtacaagctgcggctaatatatggagcacatcttctgatgaacaaatatataaaatgaaggcttttgtaacagaaatggttcttactgaactttcaaatctccgacaatttgatatatccttcaagaagaagggggcagaaaagaaaaagtcattagacacattgtattgcccaaaatgtggaagtaataatgttgaagaaagagcatgggtaaatccaaacacagatgaaatcagatataatgattcagttgaggaagaagattgctggtgtaatatttgtgaagagcatgtagaattatgcactctttcagaattatgggaaatgtttggggatattccggtcaacaatgatgacgagattgaaaaggactttcttaacttcttagccggaacatcaaagttagatgtctggcattggttcgatgaacggtgtcccaataacctgcacgatgatttaatgtatccttcaaatagcaacaatcatggataaatctataaaacaaatagagcaagagttgtttaatctcgaacaagagaaaaataagctggagaaaatattgattgatgcgatttcttccgcaatgttaaaggttgctcaaaataaacctatgcagcgaattagtaagcattgttttgtgatttgtttttcagatatggtcgagaatccctgggatcctgggttttacgactgggagaaatccatcagtatcattttgaagtttttaagacctaagccggcaaaagagtgggtttgctcattggttgcaaaattgggaggcacaccaaagaatcagccggttgtttttgaataccgtaagaaaagtttcgacgtgatgtattcaaagaaaattccagtgtctcggatatttattgagcaaataatcaaagaattaaatcggtaacaatcatgaaaaataagatatatactcgttcagtcacaattcgtgacaacgacatgaaccgttggggtattacatttgaagtccgtgaggtagacccttgtacaaaacgaaacattgacactcttgaagagtttgtagaacactttgaagtatcagtgcgtgctgaaggttgcggtagctacggtcaatgttatggcaggataacaccaagaacacctggacaaaaagacttgcttgatttttggaataaataccattgtgccagtatagcaagtgggaccagagcacaagagaaatatcttcatggagaacaatataaaaaagattttgatggattcatcaaactgttttccggatacgatgaaaatttccgtaaacagtttgatgccacatcattcaatatcatgtgtaagttttatcaagtacaactcgaacacatgcctacattgagaggagtgatttcaagatatgcagatggtaatcctatcgaatatattcttgggcttaacccaaaacgaatcagacatgatgccaatgacttgtatgtaaaatacatttttctggcgatcagagggctgtatatcgacaaaggttacaaatatggaactgattggctttacttgcccattccagaagatatatgcaaaagaatagatgatttgtgcgaagtattacaaaaagaagaagaagatttgtctcaaagcttcgctgttccaggcgattttgacatgagtggtaattttgaagctacaaaagatattgttgaaaaagttatggaaatgcgtgattgtgatgaagaggaagctaaacggtttgtagctcttgggattcatttgcaattgacatttggtgatttagatgatacatttcaatcgaatggcgactgcttatatcaagcaaatgggacggaatattatataggtacagaagaagagttagaacaattagccagtgacatagtacataataatgatgagtatgaatatttttggcgtgaggcggttgcggcccaaaatacaatagattctttggaagactggttggattctataatttccatagacggttggtgttctgttttaaatcattgggatggtgaatacaaaagttataagatagctggagaatatatttgtgtttgtaggtcataaaacattgaattataatggaatatattaagcattctgattttagtgccatgtgtgacaaaattagaaaaatggaagcggaagaactggtattagcattgcaagctcatggtggcaaatttgtttgggttgacgacgataacaatgagaaattattatacgaaccacctacaatcatggtcaatacggatgaaggccccatggacgttgtggtttatgaagcacggctgaataatggacatatcaacttgttggcttacgataaagaatggggcaacaagcaacatatcgagctggagtatattgccaccggacatcttgcatatcttatagaatacatgcctgttacagacaaagtaaaatctgtagcaataaacgatgattaatatgggacataaaaagacgattgattattggagacaccccacctattttgaaattaaatctggagagggagctatccattggttaacaattgatatagaaaaggtactaaagcctgatggaagtttaaaaaaatggtttgtccatacagatggattacgatataaccgaccatgaagaaaggttgttcctgttttatacaagaacaacctttatgttaatatacagttaaagtggacaactattcacaccatacaagtaaacaaaatctattcaaattaaagctgcgataaaatgccgttaaaaatagaagacataaaattggcaggaaccaggtttgatggccgtgctaagttgtccccagaacaacgccaggccattcagattttggcccgtgaaggatatagtcaaagaaagttggccgcaatgtttaatgtaagcaaacggcttatacaatctatactatctccccctacacgcaagacttacaaacaatatccaactgaatattggactgagttaaaacgaaaatatcgtaaaaagaaaattgatttatataaaaatggaaagatcaagtttaataacaagctgaaaaataaatgagacgcaagcgtatcaagcgtgtagctaacattgattttggctatcgttcaattactggcgcaaagcaacatataaaagtattcttgaaatcgcttctttcgcaaatagggctacaacaaggaatagactatgcagtaacagctaatcatttgcgaattagacatgtgaaaaatattacaggaaaaataaccactacacttaaagagatattcccagtattcaatttttattggaagactccaagattattagtgtggttctaaaataaatcatgtatggaaaatttaaaatttagtgttggagataatgtgaaaattgtatccaatgatctgcaaccagaaatggttggaaaaattggtcgaataaagaaagtgtacccgtcattttctgaagattcagataacaatattcacccttcttacttttatcgtgttgaagtaggaggaactgtcttaaaaggaattgctacaaacgaagatctaaaaagtgtatcacattaaggaatcatggtgcaagatgtgtgtttcggaaagcaatcgggaacggattaaagagaaaggagattgaatatgaagatatatggaataattagaacagtctggaacggaaatagttattcttccaatccagacgaagatatatttctttatttgagtaaggaagaacgggataagaacatgcccaaatgcgttagtaatgctgatattgaatacaacacttttgaaacagaaacggaggactaaactatgaaatcaaaacaagtattatcagtcgaacagatgaaacatttgcaggagcttgggttggatacaagcgatggaagcatgtgttggtgctacgctctttcttataaaaatgcaaaatgggaacttgaaatatatgaagatgtaattaatcaaaaacgagatagtgcattttgggaaataattcccacttacaccttgcaggacatttttgataagctgccttgttttattgacacacatgtactaaccttacagaagcttgcaaatagcggaacatgtttatatatggagccttattcgcgttctatattaaacctgacagagagtaaggagcttattaattcagcctacaagatgctgtgctggtgtattaaaaacggatatgttgaaaaggagggtaaataatgaaagcgagaataaaagagactggagaaattatcaatatttctgattacgcacgtgtcacacttgataagtgtgatagttacgggagtcctattgaattaagttttgatgaggttgaaatacttcaagagaagtctgataatattgattgggaacaacgtagatatgaattggcaaaatccgctatgcaagggtattgtattgctttaggaataaacgatgacagtgaaacttatgatgatattgcaataggctctttgagggtggctaatgcactaataaagaaattgaaagggaaataaccatggatatagaagaagcaaaaaacaagaaagcgaaagccgaaatggagatagctcatattctggaaaaacttgaaaccgaaacgggtttaaaagtcagcaacatgttttatatatgcagagaaaatgataaatctgcgttagctgtttcccccatagagcatataaaaaccaatataatcttaacgttgtaatcatggaaatttccgataggttatcagttgatataagccttaaaaagaaggaggagtaaatatgaagaatgaaatttcgtggaacgaaaatacttattataagatttataatccatatagtgatatttctcctttagaaccgtgtgatgcacccaaaatgaaaaaatatcgcccaaaagatgataggtgtacaaacaagcagattgcgaaacgcaggaagaagaataaaaaccgtaaaacgcataggagaaaataatcatggaaataaagaacggaataataatagacggagtgctgcataagttagtatcaatacatgacaatgacccatgtagtcattgcagtcttcacgagaaatgtaatttaaattttgacgaagaaccatccttatgtacaataattgccggacagtttaatccagaagaacgttttgtcatttgcggcaaagtaactgttacaccttattatcgtgaaacacctaaaaacgctggagaaataatcaaaaatagataaggaggaataactatgggatttacaacaccgtgcttcatacgcaaaaatactgctaatattagaaatagattagaagaatttggttactattgtaatccatatgtaggttggcgtaatttatactacaatttatgcacttgtatatttggagctaatatggtttattcattggacgatgatgatacagatgatcttgaaaaaatagatggtcttattgattgtggaatgaatgaggaacttttccttgctatcgctgcattgagggacgatacagataaataccaatggtttacggatgggaataaatggattcagtgttcagaaatcaggttctctacctactgggcttacaatgatgttgacattaacacggataccattcacaaggctaccgtaaacgaactgattgaacactttaaagaaaaagaatgaaagcacatgtaatgaaacttgaaaacaattgtgtgattgttgacgaggaatattttaatgagataaagaaggagtcagaatttaaccaggaaaagataaatgagattgccgaagaaaggtttttgaaatatgtcaaagaaagcggcatcaaactttcctataaagtaaacgatataccttatctttttcaccacgacttgttgtatgaaataaattatgatgagagaggttatcctgaatctgtgttagagaaggtgaagcatgttattgcagacgatataacagaggctttgaacgacaagtttaaaggactgaaagacgaggctttgaattacgcaataagcgagtttgacaagcagaaacacggtttgaaggctactgtaaaaatatggaaatgttttgcattaatctttttcattatgactattgtttcaataaccgcattatttatatagttatgaccgaagaacttgtaacattagagacagcgaagctgctgaaggagaaaggatttgtttggaagtgtgaacacataataggctgcaataaggttattacaaaatatgaccttccgcaaagtatgtcgtgttgtacggaaatagataacgaatcagttgaatttttgtgtccagtattgtatatcgcccaaaagtggctgcgtgaaaacaaaaaacttcatatcgaaatatcctatatgtatggagactattggatatatgatatactgacaattccggaacatgatttagtaggattgtcggatagacctattatccattataaatcctacgaggaagcactggaagccggaatacaagaaactttaaaacttatataactattatgagcaaaggaatttacacaaaagaaaatgtaggtaatggtgtattcatctttaccgtcaataagaattttgtagaacctaaattttggggactgcatgaagaaaacgaacaggcgcaatgtgtagttattatccatgatggcaatgctttattcttctatccggaagatatggataatgaaacccatattcttcttgattgggagaaagagcaaacagggaagatatatccaaccacagaagaaggtatgaaggataccgatggaataggcaataccaaagcattagctgcatccggaagcgaaattactgagaaagtcatagcattggacttatgtggattaagttggcacattccgacactacaagagagtgtcttagggtacgaacataaggttatgctgaatgcagccttagctatctgcggaaaacaaccagtgaaagatgactggtattggtgctctacgagaaaagaaaacaaacgcaattttgttctcgattggtactatggtgttagggactacttcaatctggccagtaactattgggttcgccccgtgtccgctatctctcttaattcactttaaccttataatagaaagaacagatgaatctaaatgaactgcgcgaccgcgcctataaaaccgcttgcgaccacggtttccatgatgaagaattgagtaacgaacattgcctttgccttgtaatatccgagcttatggaagccgtggaagcggacagaaaaagtagacactttgataaagaaaagtataagatcggtgaatatgccgagtgtcaagggtggctaacaaatgaagaaaagtttatcaacgtattcaatagatatatcaaagataccatcgaggatgaacttgccgatgctgtaatccgcctgcttgatttgtgcggattgcgtaagatagacattgaggactttacggaagaaatgctgtacgaggcagaggaaagttgcaatgatgagacctttacagaaagtgtatacgctatatccacaattcccatcagatatgagtatgaatacgactatccattaggagggcaattaaacagcatgctattggctattttcgggcttgctaaacatttggacatagaccttatatggcatatcaatcagaagatgagatacaatgaattgagagaaaacaaacatggaaaaaagtattaaacgggcgccctttactcttatgtatgacccgcattactgcccgttctgtaagtttcctgaaaaatattactggaagatgcctttatggaaagatagagacaaagttaaatcacgcacatttttaggatggtgtatgcgagtaatagaaaaggtgtacttagcaatgcaaacagagccaaccattctacaaactccttcttccttgacaagccggtatgtacctccgacaccaggcgatctgtattcaatgcagataataattccctctcaacctcttgcctgtgacgttcaagaagaattgagtagttgtataaagttataccagatgtactcacaccaatggtcaacacgactatcagacaaagaaataccacacggatacatagcggttcttgaacgttatcatggagggaaactaatatcccgcataggcttgaagacacaatggttatgtcacgccagaattcagatcgtttctgaaaggattggatagataaattgctgatttcattatgaatatcctcataatatttcgtaggtattttgtacatgcttagaaatacatataacaaacaatagtagtaaatatggcattaattattatagttggatgcaaatttaataataaatttagtataatatattgaacatgaaaatcatatttcttgatatagatggagtgatttccacggaaaagtcacattatgcacttgataaggatgcgtgtgatttacttggtaagattatagatgctacggatgccaaaattgttatttcttcgtcttggagaagaaacacggtagaagatacaaaaaaggaattaacaaccataagacattcagtcccgtttccatttccatacgctgacagaattgtaggagtaaccataagagcgtatgtctatattatgcaaggtattcatcttagcattcctcgtggagttgagataaaacaatggatcgacactcatatccactctgaaaatggaaaaaattggaactataaagagattggggttgattttaattacgtgatactggatgatgatagcgatatgcttcttgaacaagctgaacaccttgtaaagactgatacctattggggttatcggaagatgatgttgagcgagctattaaaatattgaaccaaggagaaaggtagttatttcataataatgtatataaacaatgaacaaagaaagaaaaggtagattcaacgatgtcataaatttactggaagatgccaaaggggaactggaggacatcttaaacgaggaacaggatgcctatgactccttatcggatgggcttcaaatgtcttccagaggagaaaaaatgcaggagtatattgacttgaccgatgactgcatagggaagataaatgtggtgattgattttgtggaaagggaaattgtgaagaaaaaatgataagtatttgtgtatttcaaatataacacctatttttgccataatatcaaaaaataaaaatcatggatcgaaaagaattttgtgcattaatggcaaaggctaagcaagaatctggcataaggacttctgatatttcgtttaatatgaaaatgttattaccttcattgaggcgttttgaaaaaggtgagcataatttcaatttaaaaaaagtaatggaatatttgcaagcaattaattcacatattcagatagataaagttaccatagctaattatgaaagcttattattatggttggtcgatgtcagaaaaacacattctttatctcaacgcgctttagcaaaaaaaattgaatgtgccccccttacaattgctaatgttgaaagaaaagctacaattataagtatagatactttacttaaaattgtggatgttttaggttatgatattaaaatagaaaataatgagcattctggcatttcattaaaactttaaaaaaggagaactgatggttacgtttatttgtattatcatatggatggtggcagggctttgtattattgttatgtgtgagttttctttagaaaaagaaaaagaccaacatgtttcatggaaaagatattgtatttgtatattgttatcctgtctacttacttattttcttttatatatgcacaacgaacactatgaattattatctgattttttcttggctgtagggctaatttgtgttattatttacgccatttctatggcctttgctaagcgataaaataccagacctatcaatacctgaaaaaagaagacatgtatccacacgataatattttcaatatttattacaatataggaaaacgaactccatttttagttaaacgatgtgaggtggggctggtacgctccgccagcgaagaaagacgtattgacccaaacaaagatcggactttcttagttgaaatagtaaagccacacggcaaatatggtaaggcttatggtaaatgttttgtgaacggtaagcctgatgacacatataggcaagaatgttatccaaatatcaaagatgaagaaataccttgtgctgggtgtggggaatgggttctgattgatgttccaggtgtatcgcttgatgaaatattccctattcacaaagcgagtgatatacttatgtttggtaaatataagggtaaatcttttggtgacatctacaaagtagattgccaatatcttcattggttagaagcaacggacaggctttttaaaattgactttgaagagcttaaacaattatatccaggtgttgaaaaacaagaagatatacctattgcagacaaaataattgattttggaaaatataaagggaaaaaatttcgtgatattaaagatgacatttcttatcttgaatggcttgtctcaatcaacagaatatctgctgaagacttcaagttgctgactacggtataacggataaatatatttcgttttaataccatagaacaaaataaaaaaacgttcgtttatttgaattcttttggggtatcacatttgtgttaaatattaacccataggtttatttattatctaatatatttggataatacgattgccaacactatttttgtaaaaagtatcgtttaattcaagcatagaaatatcgtggaaatagaaaaaatataccctccatatatttatagtattaaatatgatgacgaagatgtcaatgaatttgaacggctgtttgaaaattggagagatttggatgtagtcgtagatttctttgaaaaaaataaagaacatctgaaatcaaaagtttggtctgccgtttgcgaaccagaagccgctgcttatcaagtatctgaggaagcagatgatttggaaatcttgtttcgcaagttatatttcaacgcaaaagaaaaaagcaaaccggattttgattctcactttaaatttttggatgggaaatataaatttgaatttgaatacgcaccaatgaagtcttacggtaccgaatccccctctttcatccggctatatgctataaaaatgggaacaaacagatatattattgtaggagggggtattaaactgtgtaaaacgatacaagaatcgccgtatctaaaagaccatattatccaaaatatagacaaggttagggcatggttaaagtgttacggcatatatgaagaaaatgaatttactaattaaaagaataactatggcatttaattttgaaaaactgaatgagttggcaaaggaccgttcacaagaagtcataaggaaatccgaggagctggaaaaaagcagggattggttacggatgtctcgaatgatagcgcttgcaattcgataccatctacgcaaagaggggattacacaaagagcatttgctgatatgcttgatgtgtcccctgcttatatcggaaaattactgaagggcaatgagaacctcacacttgaaacgatttgccgtgtgcaatcagctataggcgaaaacctaatttctatttatcgcccgtatgagtgtaaagtctctattttatcttatgatataaacagctttagttttggtggagaaaaagataaatatgagtctgtcactacggttacagaatattcctccattaaaaatgccgcataaaacatttgaatattatgaaagatgtgatgtacagatacgctaaaatggaattggaacagtttgccatgtttgaagaaaacatgaaggatgaacatggtgaaattcaagtacaaacagaggcgcagtttaagtatgataaaccccaacatgtgctttgtagtaaaattacagtgacattttccaatgtggagtctccactgatgagggctgtcattgacagttatttcttgatacacccagattctataagtggaattactgacagcgaagggcatataatattcccgactaatattttagtacaatttgcttctttgaattatggctcacttagagggataatacatttaaaaacattaggcacaaagttgtctggttatatcttaccgcctatattttttaatgatattattacaaaagactatatagctgaataatcattgataaagcaaaagtgataatttcaaataataaatcattatggcggaagaaagtaaatacgcatatgacgaggaatccgtcaaagcaatcatgcactgggcggaaacagcacagttaccgaaagaagtaatattatcggaatccgaacatatctacgacacatctttatatgtccgggcgaacataaacgacatcaaacagcattatccagatgcgttttataacccggctattgaccggttgtatcggttaaaggaatttgtagaaggggcggctgaatagccgctcttttttatgtctaaatatatttttaaagaaaagtataaccctcccctcttccattttcctattctatagaaaacgataggaaaatggaataccaaagtgtagcaataataaaagatgaaaatgattcatctcaaatgtttattctcaatatcgaaaaattagcagaaacgattgtcattaaaggaaatggaacagaagactgcaaaattaaagattttcttaaatcaacaataaaagaaactcttcgcgatattcttatagatttgttccatacagacaactccaaaccagtaattgtcaacattaatactttggtatctggaattgtatctatttaatggttagacgattttaagaagttccttccgtagttagtgaacgttatttattatagactaaaattttattatatgaaagctattattgaagcaaaaaaatatagggacagcaattcttcgtatattgttgtagagatacgcttcttttgtgttcctatattttattataaaaagcaatgggcctgttaatctattttcacgaaagcatttatatttcctgttattgttagatatgctccttgggtattactccagtacactgcggttaaatactcgttgtcctttttgtctataacaaccatcttgattggatcaattgtattgacaatttgtacgatgtctccaatttctatattcataatgataaatgtttattaattgagaaagtaaaggtactgctatttattgacaattgaatataattgtgtataattatttttcaaaaaattacttggttttctcaactacccctaccctatcccaactattacttaaaaaggccgaagatatgttctccggtaatgcagataaaattcatcaatttacaaagtctttttgacttctttttgattagttctgtaaaccttgcggtggcaactgaaataatatcataaatcaaaatagcataattgatccatgatatttcaaatgcgtcgacaaggtttgctactaaaagggaacctgcatgactaatcttaccatgttagttgaaaattacataaattgctgaaaatcgcgtataatcatttataaatatgccaaaaaacaaattatccattacacctccagacaagaagaagactttggaggcattttttcgttattatgaattaagtagtttattgttcgatcaaaaacaaagcgaaatatataatgtcacagatattccaaaaacaaataagttttataaaccggccaaagacatagccaaacaattgcaaattaactggaagactatgacgcatgaggagagcaaccgtatcatgttggctttattggaagattcctttaatcttatacgtgaaatagaagattctaaagctataacacttcaaactaaaataataatagaaaaatgagtactgtacagatttacgacttgtatgctcaaaagattgccgatataactaatgtcccctacccttacattgttatattgagagacaagaatttattgaatttaaaggaagcaagagacaaactaatccggcacgattattggaaattggtaaaaacaaacaagtttacacataatcagatccttgaaaatcttgccagtatatatgatgtaaacaaacgtcaaattttatatgcaattaaatttaaacccaagcgtacatattattgtcagcaatgtggctcccaattatctaaaataaaatttatccggaataacggtatatgtgacaggtgcatttctaatcaaattaaattataattttatggacaatctgtacattgaagcgtataaattctataaagaagaatgcgcaaatagtttggtattatttcataaccaatcttgttttgaagcctatgaagaggatgctattcgattaagcaatccccttaaccttcctgtaagctatagagcgggcataaaatattgcgcttttccagaggatgctcttgaaaactctctgccgcttcttgtacacattggtattccagttaaaattgtagaataccgtaatgaaaaaggagaattttcaatcccaaaagtgaaacgtattttagaagatgaaatcatggattattgagattttcgatatactaataaagatttttccaattctctgaaatatagttatttatattgattaaattatttagttttcgtttaatttaaatatctgtattacaatattttaaatataaaatacattctaaattgattatattttcaaaaacaaaatattacctttgcctcgtcgtcttatagttggcgaggcttttatatgcaaactaatatcatagcaatatggacagaataaaaacaaagttgaaatttactaaatcaaccgtttctgggtcttgggtgggatttatctctatcaatactaagaccggtaaaataaaaggtgtgagagaagattccgaagaacccaaatgtgtatgtattgcatcacgtgaactggaggcggtaatcgaaccagatgtattatatgatgtgcaaatgattccaatgacaaataatagacgcggattcattgttgttgcagcagagccacatgcttttgaagctaagataacttctacggttgttaaaaacgccatatataaagtagaagtaaaatttgggaacaaaaccataatatatgaccctatggacggtgaaaggttttctattcgtaccattagcggtgttataaagcaactggcaaagcggaaagacattaaaaaccttttgctggttattgaagattttcgtaaagcagccaatattgtgttaactgtgtttcaaaatgacggtcactatgtccccacaaataaagcttataaaacaacaaaagcctaaattaccacgaaagcggaaaaaagcatgtataaaggcacagggacgtaaatcgtattacagtacagttaatcttgctaaagtggatggcgaatacccttgcaaattttggattaattcgacagtggagatgagaccaacaatgataaatggtactgtagctcttattcccactccgtctcaatattggtaggatatgataagaatcccaatagaaggaatagctacagatgcagctcattctgtaaaaaataagacaacagagtatcaaggaatagatttgcgaaccggacaacggatcttttatcagaacctgggaaacaaaacggtgaatattggagagttcttaggcgttgttgaagcggcgaaatacattattgaaaacgattattcccccagaattatctatacagatagtataacagcaataacttggttccaaaacaagaaaacggcatccaagaagaaatgtaaagaacttcagaaagccgagatatttcttaaaattcttgcatgggatgttgatacaattgaggtccggcactggaataacaaagaatggggagaaaccccagctgattttgggaataaataaaactgtgttgccaatcataagcagctaataattaaattattatacaatgaaagaacagcttatagacgaaagagcaagtattattgccaatttaagacaattggttgagtccttggtagaattaaatgcgagaaccaaagcacacgtgtcttccaataagacagacattaagaaattgaaaaaagacaataaagagttggaaaagatgaagagccgaaactcattttttatacggttcttttctttattctttaagtcttgataagacgatgccgcaatggtggaataggtatacacgatggacttaaaatccatttatcaaaaaagatagtgcaggttcaactcctgtttgcggcacaatgacataagtcaataagagttctttgaaatatatcaaattaatatacgatgaaaaagtatgtagaacaattcttttttatgatagctatcttattcgttggcaataggatattcaaccatgttaacgcttggttgggaattgctatatgttttggggtttgctatccagttattaacatcattaaattaattatcaaaaaacatgaagacaaagattaagtgtatgttggttgcttttatggcaactgtaattttttcatcctgtgagcgtgtcgctcctaactatgccggagttctaatggagaactatggtaaagatggcaaggaggattttaagattgtgtctgggaaggtatctacatgggaatggggaaccgaattgtttcaggtgccgttgtttgaacaacgtggcggatttcagaaatcagtaacgttaaaagcggccgataacacagagttcaacgctacccctctatattcatagagagttattaaagacaaagcgattgatgttgtatttgataataagcatatcggaaacggggatggatttatgagatctttagaggataacattcttgaaccgcgcatttatgaccttattaaagaagaaagccgaaaatataaaaccgatacgctcatggctgatggcggctctttagcttttgaaaagaaactggaggatattgttagaacagaatttagagaccgtggcttggacttaaaatcattttcagctcaattagaatttagcgatcgagtaagagaaaaaattgataatagaaacgaggttaatactaatatctctgtcatagatcaaaaaatcgaagagcagaaaaagcaaaacgaattggaaaggttaaagacagagcaggctcttattgcctcaaaggggttgacaaaggaaattctatacaaacagtttattgataaatgggatgggaaaacacctttatacggggtgactccagaatttcttaaaataaccaattaacaatatccgcttccttaaataacaaataccaaggaagcggatttaaaggaccggtagctcagttggtcagagcagcaaactcataatttgaaggtcaagagttcaattctcttccggtccacaccacataggttatttagtagtagtagtagtagtagtattcttcccccaattcgttgtgaaatgcgttggggtgttgttctggtaattcagcaggttagaatgcgacactgacactgtcgaagtcggtggttcaagtccatcccagaacacacggtttacaacgttctttgacattttgaaaaaaagaggaagcaatatgctatgaagttttcatataacttcatggaaacaactgtaaacgaaccggtcaccgttgcacattgcctttattcctcaaatcaaatgtttcgttcttgcagattttcgctacctacaatggtaccaatttgtgtgaccggccacgaaggtgatgctgcaagatacgaccgttatttttgactgggtttaacggcgacccttaacctcggctataaggagccttatctcctttataagccacgccaatgcgcagattggcaaggttatattcaacaacgtttccattgcggttgcaaagttaagacttttagtcaaaagccggtgaaaatccggcaatttactcggctcgtctatcggaaaggacatctgcctttcgagcagaaaagaatggttcaactccattgccgagtgcaacaagcccgaagtacaagggaacgaacatgcaggttatgctgagacaagtcgatatgcaagtaaactaagccctgtctggaatcgttggtccaggagtgtgataccgagctgttggcagaatcggtatgttagatgtctttatgggagcgttcgattcctccaccatcgccgaaaggggatgggtcggtcagggagataaagacatcatttgctcttatagctcagtggcagagcggatgactgttaatcatcaggtcggtggttcaaatccatctaagggcgcatttgacgaatagaagattgttattggattagcttatttttctttccgtgaagctgtgaagttgtgaaacttccagctatctggttcattagccaagtggtaaggcaatggtctgcaaaaccatgaacgcaggttcgattcctgcatgaacctctaaaaatggggagctgcaatgactcccccaaagataacaaccatagtgatgtatggttgtgaaatcaaaatgactgcgactattcgcaaagttgaaccaaaagagacatgacagttatagctgtctgaaggacaacgcagattgcaactatgttatctcttcgctctttactaaaatgattcgacttaccagtaggtttagtcatattgcctgcaaaggtaagtgaaatttgcgataaactgccattttgaagaaaaactgtttagggttaagtggaagccggtccctgtgcaattgctggaaaccccagtacaaacacttatccggtcatggtggttacagttgatccaccattatagtgcattagttcaggggttagaacgctacactgtcactgtagagaacacgagttcgattctcgtatgcactgcaaaaatacaaccatgcagccaactactgcatggaggaagataaaaaataaatctattttgattaagcatcagctactttctaaacttaatatataaaattatgggtaaaattacaatgtatgataatttaacaagcgttgtagcaaaattaagcgaaggaaaccctggggcaatgaacgcttgctgcttattaatcaaagaaggaggttccatctatccatacggaaacagttttgaatatattaaagatctggatgatcttggtatatatggaactgatatatatgtcctgtggagtgacatttgtcaacgtgatttagcaaagatgattaccatgttacgaatcgcaatgagagatgcaggcaaagcggatttgctcagaaacgcttgtggtcgacaggattattctggacgaaaattattgcaagacgatgatattttcggctcaattttcaattaaaatttagaaaaatgaaaaagtacattggaacaaaacagattgaagcagaacctatgacattgggtgaagcgtttgagaaaaatttactgcaagcagatggtttagaacccactgaagccgaaaaaagcaaaacaggttaccatgtgaaggataaatatggttgtgaaagctggtatcctgccgaaccctttgaagaagtatataaatgtgcaaatacttttcttgaccttttgatgattgagtataaagaactcgtgaaacgatttgaaaagtgtactgcatttgtagattctgaaaagttccgtgaagtggttaaggaagattatccagccttcttactctatatgcaagggaaagctatggaaaactatctcgtagcattaagtaatcgtatagactatgcaaatggtgtaaagaaagaatttaatacacgttatagcttcggtgaagcaatccaagcgttgaagttcggttttgccatccgtagaaatggatggaatggcaaaggcttaatggtattcaaacaggttccggctcatatagaaagtgacattatccctaagatgcaatctcttccgcaatcagcaaaagaccttattctgaaaggcaagggattcattgactatacaagccagtgtcttatctacaatgagaatactggacgtgctgattcatgggttccgtctatcagtgatgtatttgcagaagactgggaaattgtttgttgatgtatgaagtatttaaagattcacaagctactatggtttataatcgtagtagcttttactcttttagagggagccgtaatagtgttgtactatattattttcttgatatggaactttcgctatcccaaggatttatgggctggattccatagtgctgagcatgattacgaaaaccactggggaggatattcatacaaggacaaaaacattcttgaaacgattattcggagatataaatgtacatggtcatgaatgtattagagcattatgtaactgaaattataggaaaaccatattaccatgattatggcagtggcaatttcaaatggtggctcaaggtgaaagcagtttgctatggatgtgattgtgagactacactcatgtttgacacaaaagaggaagcagacagagttcaattgggctatatgtttttatcataatcaaataaaatatgaaatttataacccgaagtaattatgcaacaaattatcgaagtagaacattgtggaaatgaccatcttgaacccatatactcaatttgcgaaattccagttcacggatttcctaagccacaaaacggaggtttatggacgtcaccaatagattcggaatacagttggagaaaatggtgtttaagtgaagatttcaatgtatggcagcttgaaaagagttttagattgaaggtagacacaagtcgattacttatcattgatagtttggatgatttgatacaaaaaatggtacatacgcatatcatggaacttggtcagtatggactattttgtatcaactgggggcgattggtaaaaatgtatgatggcatttggcttacagttcgtggaatgatggagacatgctgctcttatccatattctttacattgctgggattgtgaaaccgtatttctcattagtgtcccgttaaaatgggacgagttaaacaattaatcaaaaagccccggaatcaggggatcatttagatctttgacatcattgaaattagtcttgtcgaacaggtcacgcaagtgggttttgtcagtcaatgatatgctgagaatttgtaaaacttcataggttgaacgtttcaacttcatatcatgttggacaatagccacaagacagtacgtgataatagccacactgatttgtatgcgaacagcgttctctgttgtgccccagaatttctttatcttgagatgctgcttgagccatttgaagaacagctcgattaaccatcttttcttataaagatcggcgacatccagtgcagaaagttgttttgcattcgtcaaaaaagtgaactcacggtcatcctcttcgtcgtaatatcggacgagtctgaatgactcaggatattttttctcggagagatatccggtcagtttcacttccgcatctgtcattatgttctttggcattcttcgcttccatctgactgtcttatactttaagttcgtcttggctctgacaacaaagaaagagtctgtaagatgtatcctatagagttctttaaaggagtcataagccctgtcgaatatataataagcatttggttcataatggattgaagacattgctgtggaatcatgctttgatgcagtagttacagtatagaaggcaggaacttgtgcttcaatgtcgtataagacatgagctttcacccctcctttcttgcttcggaactttgcccatgggaatgttgcaagacacaacggaatcgttgttgaatcaaacgcatatttctttccggaaatgtcaaggatgttggtcgtccgcttctcgcaggcttccttcatcatatagaatgcaaagtcttcgaagattctgtaatcacggttctggttcgctgtcgcaagagttgtcttggctatcggttcacgacctaaaccaagatgatattgcttggccctatgcgcctcgaaagcaacgactaagtctcgcaggctctcacggttactcagttgtccaaacatcatcgcgagcatctgattccagcaagtgaaatgtttcacatatctgttgccatcatacttgcgaacatagttgttgaactgagtcctgttcagaaaagcggttaattgagagaatacgtatttgtcttggaacatagcagccatttgtattagactgcaaagttgcaaaatcaagtccgtttcatttcaaaaaaccgtgtaattgactatatttcaataatttcaaagaactatttatccacttttacgggacagtagtgcgtatttcttttcaatgaaaagccaatcatcgaagtattaacaagcataaattagaaaaatgacacaaaaagaattacaagacactgttattgtgaccggctggaagtctgcttatatagctaaaagaaacaacagtaaaactctgatgagttcagtcagacgagaaatcaaagaaaatgaaatacttggtctgatagtgtggtattcgcagcaaaagtttgagaatgataagtgtgaggaatatactgtcactaatggaaacggcactgttgagctaactatcaaaaaaggaggttagtatgaatataattgaattacgtaagaagttacgttacgatattgaacatcctaaatgtaaacgatgcggtaaagaattgcacatacctcagccgcctaaagaaatacaacaagcttggggtatttttgcatggacggcttttgtcaagcaatatgctaagcatcatggctggcatgagcttgataatctcaataaaaatatagtatgtggcgattgcttactgccgaccgataccccaaataccataatgctgaaaaattatgatgactgggaacgtaaatacaatgaatggaaaacaaacgaatcaaaatgaaagtatctgaagtaattaaaactattaaatcacaacttactgtagatgagcaacaactgctcaaagacaccatcaatcatggtttctggggtgattgtgatatggagttccgcaatgaagcgggcgaggttgaaaccgttagcgcatggggctattgtaccaatgatgcaaagaacgccgggcatttcagtgggcgcaaagtagctgtgatgtttaagtctatatacaagaaattgtgttcagacaatcacatggggcgtttcctcagtcaatgtaacgattggtggggtgacggaagtggcgatatgctttttatcagaagcgagttatctaacggtttggaagaatggtcaaaacaataaaattgcagcaaatatgaaaacaggagttatattggctcggttccaaccaattcacaatggacaccttgcattaataaaacaggcagttgctgaaaatgaacaagtattgattattataggttcgatagataaactctctcagcgtaatcctattccgtggactatacgtaaagaaatggtagaacaaacaattgatgacaattttcttgtgcctggaaacaaagagaaaatcaaagttgttgagcttcctgatttgaccgatgagtctgacaacagccatgactggggattctatctttactcgttcatcgtaacccaaacgaaggaaccaggattcaccatctactattctgatggctacgaaactattacatcttggtttccaggattccttctgagaaactgtgtgtcattatctcttatggctcgtaatatgtgtgttgaggggatttctgccacacaggttcgagagaaaattcttaatggtacgcttaccgctgaagatgtgccagagtgtgtatatgagaaaagagaaatgttgaaagcgtttatcaaagtctttgaataatatgaagttaagacaaataattgctaaatggtttgtaaaattagcacgcaatcttgatccaatgagtgtgtctattttacgtccacgcccaattataaacttcctgtcatctgaacgtttcaaacttgttcagttagacaggaagttttgtaaaacagatgtgtttcgtttcactcgtgataatgacccaaaatacatgatacaatgcgttaaacgtgatttggctgatgggattgccaactcagacataatatcttggtcaatctcagatgatgagcatgattatattagagtaaaagctcgtctttgggttgcaaaccactctcagataaacgaggaagaaatgaaagattttgtaaaaggaaacgaataaaaatcaaattgatatggtggcttatgccacaatcataacttctaaatcatttgtaagtattataaatcatttataaaatcagcaatggaaaataacaatgatataaaacagtctctttatgatatacagcctggagacaaggtatattttaggagcaattatttttctacaatatatactgtagaccgtgtgaccccaactttgattatatgtaataacacaaagtttcgtaaaagcgatggtaataaaacgcctgctgaaagatataattatagcagtatagaagtgcttactcccgaattattaaatcagcatcagcaaaaagtgatgcgggcgaatttagtacgacaattcaaagaaattcagcctgacagattgactaacgagcaattgcaacaaatcattcaaataactcaattactcaattcagatgaaaatatttaaaaaactgagaaaatggtgttacagcacattggagtttgccagacatacatattctgatattcatgggccgtataaaaacaggtcagcacgaagggccgcaaataaaaagagataaaattccataaaagcgcggatttattcttatctttgcgacataaacaagtgagtctatcctacatttattaacttatgattgaaaatgtagataaattggaattttggaatgtgctaccaaaatgataccaagtgtataatatactgaatatcaatatcgtgcacgaccctgagggtgtacgaagcaaaagtaaattgaagaaaagctccaaaaatcaatgatttttggagctttttcttttatgaatccctacaaaatatagaactcactgaaaactttttatctttcatgatattttataaattccgactaaacaaaatgtaattttactatattataaaaacagctttgcttatcagtttcacgttagttcacttataacatgcagtgaaaatgttctggaacaacatggttgagcatcacagagtatttctggatcaggaaatcatgaaagtaatccgataggaatatacttataaagaatgagcagttttacggaaaattaaacagaaaacgtaaaagcacaaataaaaaaatccctaactttgaaaaataacagtacccgaattgctgctatatcgaaaaacagactatctttgtagagtcgtgcaaacgacagacatatatagttgatgtgtttcgctaacaccttgtattagaaatctggtaaatttcaaaatggaagcagggctgagcagtaacacttgtcacatgtatccgtatgcgaatgacatgcgatataggtgtggggtactgttttcatttatttgcttccgggttttaccagaacctctaatacaaataagtaaaccggctccacactttcttgttagatagtgtggcattcaagtccggtggcgaaaatggggtcagtccgaaatgttgattttcaataatggaatccatgtgtgttggataattgtcggataattggtcatgaatgaatagaaatccgtaaaacttatcagcattcataagaaaccatgcgtaggatctggctatttttacgcagaaaaaacggataagattatgaaaaacgtaattgccataataaaaaacgcttggggtgacagtccgccaccgaaagtcaaaaccggctttattcccaacccctgtgattgggagaagaaaaattatctgacgaaccccggctcttactaccggcaaaaggcatcggtcggattcatagccatgaaaggatggcttttcactattttgcgtttgccgaactgtgcctttgctaaccaagcgttttcctactttccttttctattctctatcttgaataatcagattctcgcaatatataaattatacaatcacttttggaatgatatgaaggtgtcttatcctgtaaaagttgctgtgaaaaaaacggcattcatagcattgttctcaggaatggtattgtcagccggagctcagaatacgaacctgataaccgaagaggagcctgatataaaggtgacaaaggatacggtatggaatatggcgattgaaaagaaagcgacacccaaggtacaattcccccaaccgggagacacaattgatgtactggatcctatcgtgtacagtttatgctataccaccgcctatgataggctcgcccggaaatccgtcaaggtgaaaacttacagaaaagagtacgctccgtatatccacgccggctatgactttggcgtaaagcattggaaagaaatcgttctaaaaaacttctcctcgctccggaaacaattgcagggcatcgcagagagtaccggaatggaaagggtctgcttccgcaccggagcccttatgggagcatactcaacaaatccctatccggaactggattatatcgacgccgcaatttccgatgtgctgaaacaggtaaggaagcatatcgcttctgaaaatgagatgtcccggcactatgacaccttatccgataaatggttttcttttttatgcaaagagaaagaacgctattacgacatcgcaaatcacaacagaccttatttcctgtgtcaagagcatgccgacgatgcccttattcttccagagtggatagattccgccacagcaagcaatgacatcacccaatcggaagccctggcttcggcaattgcaaaatttgactcccctgccgctccggacggaatccgcaaactgaaagacaacatgaggctcacacctgatgaacgaaatgccttgctggcacctaacgatatggtttcatatgccgtaggcgtagcacaagctaactggatcatggaatataaatggtttataggagaaactcatagaaaggagtttgatgcaatgctcctttcccgtgggaacagtcctgccatcatggccgcttttgaagacggactgagaagtgccatgactatgacagaacgtttcaaaaatgcaattctgtgtcaggactgcgactcgatatgtcttatgaacaaaaccatgaaaactgaattgagcaaagcatataaacaagacatagtttatggttatgtctttatgaacggaatggatgccgttgaaatatacagggccggtgccgagtgggatattcctgaaaaacaatcagccagcggattgcggcttgaaaaggagcaggtgcttgaaggtttcagggattatctggagggacatttgaaaatgggtgtcgaatatgcccggacactgactaaggggcgcaatgccattgactggcatttgtatgagaaagacacggaaacaataaacttgtctgaaaacggattccagcctgccattccgctacatatcacgacaggcacatcaagcgagtggagcgccgaactgtcgcagatgattacgctcccacaggaagttgtcgggcagaacattacgggcaaggtgatggctacggtggtaattgaggccgatggtgctgtcagcaaagtggaaattacaagttcgccgcatccggctttgagcgaaactgtaacggattgcatttaccgcatgaggttcatgccggcaaaatatgacggagaatgcgtcgcatccgtcgcagttattccggtatcattttgattataaatacaataccaccattcatcatgagaagaatattatcaaccgtcctgcttgcatgtctcgtactgggagcatgggcacaaaacaaaaagaagatgacagaagaagagaaaaaagagaccatggagcaacttgaagtgttctatcagttcgagacagggacggcattcagcgggcttgattcattggcagaaaaccaagagttcaaacaggatatgctcccttgggaaaaatgggcggacaaattcaagcacaagagctttaaaaagagtctgtcaagactattcatgtgctttgacaaggcattcatagagccgaacaaggattcttctatcttctgcaacctcatgctaagaggcaaagaagaagatgtatcttcatatttcggcggtcggcaaggatccggcctgtgggaaaagtattatcacgaggatgagaatgggaacttcacggggttctgcaaagaacttttcttcgacctggagactgatttgcagcttcatctgacggataagcagggcaaaccggcctatatacacccggaaaaagacatctatttgcttgagggcggcgactatgccaagaacaaagacatgttgaatatatggttcggattacagataccactgactgttccttatcaggaaattgcaggcggacacatctccttgtctttctatatgcctcaggaatacgaccgcatcacagtgcccataaaggattttggagacaaaccggtgcaggtgacttggggcagcaagactttttccatagaaaaggttgacaacaacggcttcatcatttccgcagacgcagagactctcgacaaactgaaaggcatgaagcgcctctatcacagggacgggaactggtacgagccgtcctcttcaacagccacaacaggagatttggataagattctgaaaaatagtacaaggaaaatcacgtttgaagagtggttgaaagaaaatggcatcgaccctaacaacctggaagagaccctgaaatactttatggaagacgaagtttcagaagaagataccagtacggatgatgcaggagtgacgggaaaacactacaagattgccttgcagggggacagcctgctgctctacatgccggtcgaaaagagacggaaaattgccgagataactgtatttgccccatcggaaggcgaagcatcccggttaataatcaaccgcgaacgatgcaacgaacttatcgaatggttgtgcaccgaaaaatcaccggacaataaaaagcaggccgaaccggaagagatggaggaagtggattatttcagtcctgatttccagccagccaagcccatcaacccgcagacaggaatgccggacgaatggaacatggtcttgacacaattgctcaggaagccggaagaggcagtcgagcaaggaattacaggaagaatgatggcggaaataaccatcggggctgatggcgttgccagcaacgtaaaaataaacggagatccccacccgctattggaaaaagcggtctgcgactgcctctacggcataaagtatgtcccggcgacatggaagggaaaagctatctcctttgtcgcttcgcttccggtcatcttttactgaatgaagccatggaaggatatatcctgattgtactacaggtcctgataactgggctgattatctggagaaggaagcaggactccaaagagccattaggctgtctggcggcagttctgtacggaagtgactatcaggcagcacctccggaagcatggataaaaaagttccgacgtaccaccccttccctggtctttatcgtgtttgccctgatgctgatacttataaactggcttgtctggaaatcagcggtaagtaggatgacacccaaagacgaagggacggaagccgcattggccttgctggcgacccgaaaaccctttactgtacgcaccctgctcggactgtgctggctggtaccggtgtggcccgccattcttggtattgcctgctggtatttcggcatacagaaacaaaagaccctcaggcgcagccggacatgcccgaaatgcaatcgggaaaccctccgggagattcctttgcacgagttgataaaggatacgaaacggctgactgaaagcgaacgcaaagaaacagaactgaagacggcctatatccgcatctaccggtgctccgcttgcagcgaagaggtgaaaatccggataccgcttgaaaaggacggctatgaatgctgcccctcctgcgggcaaatgacgctgcacaagaaagaaaaatatcggactattattaaagccaccactttatcagaaggactgatggaggctcgccatcgatgtatgcattgcgatgccgaatacattgtaggctatacaataccgaaaatcagcacctcttccagacgttcgggaggctcaggcggtggcggaggcagtttcggaggcggaggttcatccagccgtttctaatacagtatatcaatattaacaaaaaattgcaaagcatgaaaacgatttttatcatgggaatcttgagtttcttttgcggcatcagtgccgcacagcctcaatactggggtgagggtgcatacgatttggaaaatgtggtgttcggaatgaacgtggacaagtattattccaaggcaaggctatacgacggggattatgacgaatcattccgctatttcatgaagaaaaaagtaaaatgtaaaacccaggaaggcaaaaaggcggtcattcaggaatacagctcggtagaaacaaattacggagaggttcttgcccgcttcgggaaatttgaattcccgtataccggcatggtggcggacaaatcaggaaaactgatcggcattctggcacagggaaggctggacggagcggcggcagtggattcgctgctatatgccattgcaggaaagtacggtccccaatgctttgtcacagaagagtatttcggatatcggaattatggatggcatgtgaatgaccggactatccaactatatgtacgcaagccgaatccggagcacaaggatgccgtgatttaccttgaagagaacgaaaagggagaacggaaaattgtcggcggaggcagccagccacacacctggtatgaagtgtgcctgatggtgacaaagacgaaatatgatccgttcatcgactgcatcagcgtcggtaactggtgcaatttcaatgatctctcatcagatgtccggagcatggaaatcaatccggcagcaggcgtatacgacaccggcgagctctttacggaggaagaccttgtcccggacaccatcaaaggatatatgaacattcctaacggggaacttcccaagttcaaggaaggaccgttcgcgaaattcccggatttcaggcttgccgtgcgccattggatggcctataatgccggcctcgggaaccagggaaatcccgaagggaatgtaagcgtatccttcacagtgggaaaggacggcaaagcgaaggatgccaaggtggaaaaccgggagaccacatcgtccgaactggaagttgcagcactatataccatccaacgacttcccgaatttatacctgccacccaaaacggaaaacccgtggcattccgcatgacggtggccctcaggtttgaaaaccgataaattttctctgctatggacaaaggcttttcaataagcggttatctcctttcacgcctgcaaccggacgatccccaggaagcacgtctgcgtatgctttgtgtgaccatatccaaggatatgccggaggagagaagagagcggcaactgcgtccctttgcatcggacatggaattcatgaatatgattgccggatggatgaacgggcttcccgaagcaattagccatgaacagccggactttgagagatggctggagctgttcatgactgccggtgaagcagaatccacccgctatgtcatgcgtttgcaaatatggtacacgcattattgctgcgtagaagagttactgaccttatgccgattgctacaaaggcatcatgaagaacatctggaagccatctatcacagaatgctctactacttccgcgaagcgagaatacaatgcggaatgccttccacttccgagccggcagaaggcattgaggtatcattcaaactgctcgatgcctcctacgaacatatcaaccgtaaaatcattttgcaagcggaagaactgctcggtatccataccgaccattctttcattcagaaagtgatggaatgccatactgaagcaaagacagcagaagaactggcggaactatgcggagcaaacagcaccgttaccttccgtcggacattcctgagattgtttaactgtcctgtagcccagtggcttcggcaaaaacgtgccgagcaggtactgaaactgttacggacgacacatcttcccttaccggaaattgccgaacaatgcggctttgcgaaccagtcttacctgtctgatttctgcaagcggaatctcggtgatacaccggtaaatatccgaaagaatagaaactgaaatgaaacaatgaaaatgaattttaatatgaaactgaaaatactggttatcatgggacttgtctgtttatcttacggctgccatgcggaaggctgggtgaatcatcaaatatgagaataattatggatattacaacacttttgattatgggattacttagttttgggcttggcgtatgctccaatgcgcaaaataagcaagagcactcgaatgttaaggagattggtaatgtacccaaagaaaatgtggactcttatgtttacaaaaatgaaagcagacctgtgtactatgcaaaatatggtaatagaggttgcttatttgagttgtggattaacctgaagttaacggacgaattaactcgtccaagaactatcggagaaacatctaccactatcaatcccgcaatattaaaatcaggaaaacaaactgttactattcgactatatccttttcccggagaaacatctattacgaatgaaaatccattcagactggaaataggatatattgactttgcaatagaagcaaatgaggatgaaatacgtccttggaatgtcgtgtttacacttccctcagtagaagttcctgacgaagggctaccctatatagaattgacaggtgaatttgaagcaactgttccatatcaaataaagggatgtagtgattgcattgatttaagaacacttccggatatagaagaacgtgtagttaaagaataccaatacgttagagaactaattgctttaaaaaagattaaagaactaaaagagtattttacagaaagagattacgaagctggggttgcattatatgaatcatcaaacgacattgataattattggaatcagcatgtaaagcagagactggaaatgtttacaaaagatgaacttcaacctatagaagactaccgtctggtattttcggggaatggtcggagtgtatctttacgttcgaagaaaaaaaaaggtaaaccaagtgcactactttttatcaagcaagaagatggaaatcccaattttaaattttattgtatagaacttcatttaggaattaaaattgggactaataagctaacacctattatcatgtagtaaaaagatgagaacaatcatggatattacaacacttttgattatgggattacttagttttgggcttggcggatgctccaatgctcaaaataagcaagagcactcaaatgtcaaggagattggtaatgtacccaaagaaaatgtggactcttatgtttacaaaaatgaaagcagacctgtgtactatgcaaaatatggtaatcggggttgcttatttgaattgagagtaaatgatatattgatgacagaaatggcctattcggctaatataggagaagcattgataacaattaatcctgctatatttaaatcaggaaggcagactgttgagattcatctatctcctataaaaggagaagatgttataagtaatgtaaagccgtttcgcttggaaattggttattatgattctacagaagaagtagatgagtcaggagaagcgacttggcatactgtttttactcttccagatattgaaataccggaaaaagggttgccatacattgatatgaagggtgagttcgaagcaaatgtaccatatcaatatacttactgggatgattgcgttgatttaagaacaatacctaatattgagcagaaaatcgtcaaagagtatgaatatgtcagaaaattaatagcacagaaagatttagagcagttaaagaaatattttatgccctcctatcaagaatttgccattactatatatcaaacaaaagaagatattgagacaagttggaaaagtacccataatattataaaggaatacgttacaagtgagcttcagtcaatagaaaattatcgcatcgtgtattccagtaatggtcggagcgtatctttacgatcaaataaatatggtggattcccgagtgttttgctttttatcagaaaagtaaataatggagatgagctagagtatggatatattgagttacatcttgggatgaaaaaaggaactgataaactgattcccttaatgatataaattctattttatgagcactcaaggttaaaaaaacggatgctacttcattcctactttgaacggttagcaaaaaataattgggaagcgaaaaaggatatgagaggtgacggagtatctttggcgaagtaaatttagtatgcaataataaatgttgaattatggatattacaacacttttgattatgggattacttagttttgggcttggcggatgttccaatgctcaaaataagcaagagcactcgaatgtcaaggagattggtaatgtacccaaagaaaatgtagactcttatgtttacaaaaatgaaagcagacctgtgtactatgccaaatatggtaatcggggttgcttatttgaattgagagtaaatgatatactgattacagaaatgacgaagtcgacaaatataggtgaaacattgataacaattaatcctactatatttaaatcaggaaggcagactgttgagattcatctatctcctataaaaggagaagatgttataagtaatgcaaagccgttttgcttggaaattggttattatgattttgcagaagaagtagatgagtcgggagaagcgacttggcatacagtttttactcttccagatattgaaataccggaaaaagggttgccatacattgatatgaagggcgaattcgaagcaaatgtaccttatcaatatacttattgggatgattgtgttgatttaagaacaatacctgatattgaacagaaaatcgtcaaagaatatgaatacgtcagaaaattaatagcgcagaaaaatttagagcagttaaagaagtattttatttcatcttatcaggaatttgcaattactatatatcaaacaaaagaagaaatagaatctgattggatggaaacctgtaaacttataaataagcactcaacaagtgatcttcaaccaatagaagagtatcgtatcgtgttttcaagtaatggtcgaagcgtatctttacggtcaaataaatataacggatacccgagtgctttgatttttataaaggaaatagacaatggaaccaggttgagatatggatatattgagttacatcttgggatgaaaaaagggactgataagctgattcctcttatgatataaattttattttataagcactcaaggttaaagaacggatgctactttatttctactttgaaccggttagcaaaaaataatcggaaaacgaaaaaaggagcttaggggtggcggtataactttaaaacagcaactaaaaattaaagatatgaaaatgaaaagcagtatgaaactaaaagcgataatgattataacgatgctgggcatgagccttgctggatacgctcaagcacaaaagaaagacggtacattcgcttctgaatcaggtatggaaatacaggtggactctatggtttacaaaaatgaaagtaggcctgtttattatgcgagatacggaaacagagggtgtctattcgaactaagaataaatgacaatgtatcagcagaagttacagaacctgtaaatatcggtgaaacatccataaccataaatccggtaatattcaaatctggcaaacaaagtatatcaatcaatctgaaaccatttcctggtaggaaaactataatgaatgataaacctttcagactagaaattggatattatgattttactgagaaactggatagtatgggtaacagaacatggcataaggtatttgaattaccagaaataaagattcccgaggaagggctatcgcagattaaaatagaaaaagagtttgaagcacaggtgccatacgaaatcacaacatgggacgagtatgtggatttgcgtgaaatacccaatattgagcagaaagtggtagaagaatataagcgcgtgagacaaatgattgcagaaaaaaagataaatgaattgaaggaatatttttggccttcctatcaagaactgggaattacgatttatcaatcccaaaaagaaatagagttagattggaaaagtactgttgatattattaataagtactctgcaaatgaattacaaccaattgaagaatatagaatggtattctcaactgatggaaaaagtatttctttgaaatcccaaaaacacggtggttttccagttgctttgttatttttaaggaaggaaaaaaatagctcaggcataaaatatggaggtatcgaactccatttaagtataaaaaaaggaacaaataaattgattcccgttatgatttaaagccagtcaatatggtatcatgctccctatttttcacactattcaatgcctttgcagacaataaaaaatacggaattataaatcaaaataatatgaaacttaaaacatttatcgctatgggactattaagtatgtttagtttgggtagctgtaatgcccagcaaaaagacaacacagcgaaaaaggagttacactataccatgaacgaaagtgctccgaagaactactatctattgactatgtcaagtaacgggtgtaatttcagaattcttgtgaacgatattcctgtatatggcttttgggacgaagggacatattccggttcataccctatcaaccacttcatacagaaaagtggaacacaaaaattaaaagtagaattatatcctgcgtatacacatgaagatttggggataaacagtgaggaaccgctatatattgaaataaaaaaacgtcttgacggtcagacactggacgattatgtagccgtcttaacaaatccaatccccaaagttcagaagggtattccatactatgagtatgaatgctcttttgaagcagaagtaccttacgaaataaccgagcttgacgaactggtagatttgtcgcaagaaccgaacatagagcagcaggtggttgccaaatataatgagttgaaggatatgtacgagaaaaaggggttttcggctttccagaaacagtttgatacaagaaataaaagaatttgggttacaaattacattccaatcaataagggagaaagagatgataatgaagacatagagagaatgaagaaattttacaaacatgtagctccaatacaaaattatgaaatgagattctttggtgacaaaaagctggtaatgcttttcagcaaagaggattgcacttatgctttcagattatatgacggtggtagcaaaatgtgggcgatcccattctttttaggaatgcgtaaaggtagtgataaattggaaattgttttttaacatattaggtattgggacgatttcagaaaataagcttcactaaatgtctggtattatgaaatggagtatgctatcgtttatgggtgtattgctgttatcctgtcagggaaaaacttcgtctgaaacgcacggcgacaagcaggtatctgcacctgatactgtgctggcttataagtataaggaatcgggaaagaaaaaatcagctaacggtgaccaacaaggggcaatagatgattatacaaaagtaatatattttaatcctaattatgatacagcttatcataataggggcgtggttaaagctgctattggagattataatggtgcaatttctgattacaataaagccattgaaattaatccacaattaaaattttcgttcttttctcgtggaaatgtaaaagttaagctaaaagataatataggagctatgtatgatttttccaaagctatagaacttgattccaattacatcaatccatatatcaaccgtggtgttcttaaatctaaaatgggtgatattgaaggtgaactttctgattatcgtatagccataaaaaaatgtgaacccaatgcaaacttatataataacttaggtcgtgccttatacgatttggagcgttttaaagaatcggctgaagcctatggtgaaggaataaagcattttccaaaggactacagattgtattatgggcgtgggctggcacgtaaaagaataggagataaaaaaggagcctgcgaggactggatgaaaagctgcgaattgggatgtgtacaggcaaatatcctgctgccgctgtgtgatgatgaatatatgaaggaaagaactgattccctgaaaagacaaaatgaggggaaagaacagtcagagtaatagcgtcataataaaataatttaatatgaacaaccccaataatatacataatatgaaatcaatgattcttgccctgctcattgcaacaatcagcttcaacagctatgcacaaactaaaacgggaacagatatgaaacaggaaataaagaaaatggaagaactgatacaggagagattaggaatggtgaagacctacccggagaaacctgcctactatctacaggtaaacaagacaggatgcagactgcttgtcagggtaaatgacattccggtggggtatcattttgtagaagacaaaggtgagtctatgctatatcctatcaatgatttgctattaggaagcggtaaacataccgtaagtatacaggtctatcctcgaacgggagaaacggaagtcaccaaagatgccggtgtaaatattaaggttgtgcattataaagaaaaactggttggtatgcctgaaacattggtggaattagacactccgacagatattgggatgaaaaaaatcccgctctacactgattccataagcttcaatgccacactcccctttaaccataaaagaatacttgcagaagcaacggatttgcggacaatacccgatttggaagagaaggttcttgcccattacaatatggtgcgtcaaatgatgattgatggaaattgttatgagtataataaaatgcgccttgccagtacatgggttttgacggatatgaattatttgggaaaagaggctttggagaaagtatatatcgattcagactatttattccgttttttatgcaatcctatagattggattgcagaaccaatacaaaattatgagatggtcgtttgtggaaatggaaaattggtttatctaagaagaaaatttgagctcgatgatgttttacggattggtttctatgacacagaggaggagaaaagactatcacctgaagagcgtactgttacagcatataagttcatcctcctttatatgccacaaggcagtgatgaattagtggagctatattagagagaaataatgtaagaatgacaaaaaactgtatgactcgattatatttcgcaacaggaaaatgaataaagataaaataaaacaaaataaaagactcttgtttacacctttggtgttgttatattaacattataaaagaataaatttttatggaaaattctgatattttaaagagatttgataatgataagctaatagatgttgtgaaaaattataagcgttacggctatgatgatgaaattcgtgattatgctattaatttattaaaagaaagaggttggagcattgaggatttgaaaacattcggttattggaaaaattccgattacgaagaagcgttgatacaatacaaagcttattgtagaaattcactgatagctgtctgtgtcttggtattaagtctttgtatgctggcgcctatctatcttgtatttgtttttatggcatatcggaatgtatgtaagttctatcaggcattagggagaaaggaagaagccgtattctcctttgacttgtgttggcatcttttgttgttcttctacctaaaagagaaaatgaaagaggagttgaaaggaataagataagtttataacaaggtcgagaaaacaacttaacgttgtatctcaccaaaccttataataaataagatatgcctccggcggggttttcgccgggggcttctgacctttgcacatataaaaagaaagcgatattggagcgttataccataaaaacagcccttatcggtttattacagacacactttcgtggccaattcgtgacctgtccatcctctaagattttaggttacggaatgtccaaaattggcggttcgttgtcttgatttgtccgtactgcaaatatttcattttcagtctgtcaatttaaatttgtaactgaaaaaaagagatttcttccgtttcatcagcaaactgataagctaatatgtattttctcaattcattatataaaggctggataaaacgcattatatacaaagcactgcccatgcccatacaatcatctataccgagcttttctatctctgtattgattgggacaatatcttatctacaaattgcatagaatatctttgaattgattataaagatctaatactatctctatatcgccttaattctttttctccggcattttttatagccgaatccagttcattaagaattctaactctatcattaggtatcattccgacaaacggaacagtgtttgataccgtatttcctaataaagttgtttttatatgaagtcttgaaataaaagtccgtagctccaacaacctttcgtgttcggtagcttctacaaaagagccacgttgtatttcctcgtataattctgattcggaaaatacagtcagtgatacaaagtttacggtaaagggggatagctgattgaacacattggcagtattaatagcgttccgctttcccttgccttttcctgcaagccctgtcagatacacgaggttatatctgatatttgcttcttccagcttcttgcattgctcgataatatcattagccgtatatcccttgttcattgctgccaatgtatcatcatctccggattctgttccgatactgataccgtcaaagcccaaatgacgcaggttcttcaattcctctaccgttttcggcttaatatctgaaatccgggcaaacataccgatgctttcacaatggcgaaggtacttcctgattagaagacctaaatccaatagtctgttataacttaaagcaaaaggattagctccggttaaaaatactcgccgtgccctcggttgatagtcttgtatcaccttcaagtcttcctctacctctgcaataggagatagacggaactttgttccgtgatataagctacaaaatttgcacttgttatgtgtgcatccggctgtaacctgtaatagttgagaacttgcctcgtaaggcggtcgccacacttgtcctgtaaaatgtaatagttccatataattatcaattaagctcttgaaatcggctattttccgtatttttgtgttgcgaagttaggatgttcttttggaataaagaagaactatactatctgtcagccacttacgtttgggttagtatttctcaatatcaatgattttaagaataaaaaaaatgcgaaaaaaattagattatgaatattgttctgcttcccctatattagaatggttaggcgacaagtgggctttagttgtcttgttgaagctacacgagaatggggtaatacgttttaatgaactatataaaacaattccctctatatcggaaaaaatgctctctactgttttgcgctcattggtaacggacggattagtgagtagaaaaatatacccctcagtgccacccaaagtggaatattgtgtatctgagtttggagaaaccttgattcctcatttagagcgattgaaacaatgggggcaagaaaactttgaaacaataatggagaatagacaaaaaaataagtattgaaatagctgaatgtgcttttttgcgattctgtatttttttcttttcattaggtttcattctttgcacttggttacacaataagtacctctcaaagattttctatcctttactctcctatcatgcgtaaagccatagaatacgatttagaacaggaacgctcgttcgattattctaaagtggacaggaatggacttgtaaaccatatcgcccaattcgtatcgggattatggcaaatccatccattcggtgaaggaaatactcgaacgactgccgtgtttacaattctctatctccgttctatgggcttcgatgtaacgaatgatttattcgccaaacattcgtggtactttcgcaatgccttggtacgagccaactaccagaatgtacaaaagggtattatccgtaattccgaatatttagagcggttctttcgcaatctttaatgaattgcggaatcgatatatggtggttaatgctccggaaggactagtcgcagagccggtaagacctgtcaaccgaacaagtgccgaacaacttgccgtacaagtaaccgaacaagttcgctcggttggcattatataacgaaatcaagtcaaagtcataatcttgatggttgcttttgtcgtggcatctttgctagagggctttcgttgtttggcttcattactgatattaagcgtttgccaaagccgtttttattcgagtttgctcatgcgccacgaaaaaagtctactttttatatattttattgcttttcaataaattatccagttttatatggaatttggagtatagtctgaatgtgcgacagattaatgatcgcaaagaaaaatatggggttcttttagagtatcagcgatgaatatggtttgatcttaaaaggatttcttttaaaatccgtatatttgaaaccgaaaaccaaagaataaaaaaatatgtttaccaacagagatgaagtattggaaaaagctttgagaatattcgctaagatgaattacgagaaagcaagccaaatggaaattgccaagacctgcggattgtctaaagcaggactagtttattattttccattcaaattggacttgttcaaggctgtagtggacaagtatgtattcgatacccagcattcgaaaaacaagtttaacttcactgcaaactcactgtcggagtttatcgaccagtatgtagccggagtggaaaacacgatgcagcggctcgtacacttgttggatgatgggaataatcccagcggttgtagcttcaatttttactattatcacttattgatgcaagtaaggctgtattatcccaatgtagagaaaaaactagctgtcatatttgaacagaactaccaactatggaagtccgccattcagaaagctaaagaaaatggggaaatacggcaggatctggatgtggaagaaacagcttcaatgttctggcagatgttcttcggtacgtcctttgaagaatccttttttcaagggttggatacccaaaaactatcacgaaacctgcactttctctactctctgttgaaagcctgaaattcaggttccttacaatgtaaggagacaatatattcccacaaaagggactttaatcaaataaaaccaatcatccggtttgtttttctgtttctttgtgtatatttgcggctatataatattgctgtcagttacatggacaatgttcagaaacagaaagaaaacatcgcgtactctacaaagaaaaaagggaaggacggcttttccatacatcctttctccccacatttacattgattatagccggatgtacatgcggtactgccccacctgcaagaatccgcccgataaaagaaacccggtagaaaagaaactgatgctacactgtcaatgtttaataatgttcctgcttgtcccattatataaatgataaagtaaaattgtatggaagattttgatattcttaacaaatttgacaatgacaaactaatagacatagtgaaaaattataaacgctatggttataatgatgcacttcgtaattatgttatcaatttattagaagagaggggctggagcagagaggatttgcaacgatttggttatttaacaaacaataattacgatgaagcagaaaaacagtacaaagcatacaaaagaaattcattaataggaatttgtacacttgtatttagtgggggaattttgattattgtctatttaatctttttgattatggcttatagaaatgttgcaagattttataaggcattggggcgtaatgaagatgaaaccgcgttgttcaatgctttgggcgtgttggcttattttcatctgaaagaaaaaatgaaagaggaattgaaaggaataagataggtttataacagggaaaggtaatagctgaacgctattctttaccaaacagttaccgataatcgtgcaatgaataaaacagtccagtccataatatccttgatatctttcagtattatattgataatcataacattattttgtggcggtttaggctttggccgtctgttcggaatatatggtattatggaatattgttttttaagtatgcttgcagttatagatatactggtaatctgcaaggtctataaattatatgtaacgcaacctaaagttataatattatggttggggttggaatgttgttctattcttttgtggcttgcttttatctgtatagaccaaagtttgttggagtggcaaattacaaacttcatattgcaagctgtcggtttggagggtttcgaaggagatgagcagggattgaatatgcttgcggtcttatgtggcattatttatccttttattgggattgggtgtttattcaccggattgggaattataaacaaatcagcaacaaggaaagagtcatttatcaaataaaaaagaaatagaactgcctgtaaacgccggtttcaccttatggctgcaaactgccacccattacccaaagcaacgtacaattacgtaagtttgatataatgtctatcgtaatgacagattgataatgaacaagatacataacttggtaaatatgaatatagtaaacagaatgttactttcccttgcaatgttttgttgttgtttgaatggcgtaaaagcaaccccattgctacaagatactatacaggataaaacctaccgactttatccgttgggaattgcttgtcgcaacggcgacataacaaccataaaacagttgctggcaggaaaagatgaaccgatggcaatgagtagcgattgttacgaatttgatatactctatacagcaatctactttaacaaagaagacgtgctgaagtatgcccttacccgatacaaggacattaacgatagagtatatagcgatgaatacgggcttacgctcctgacatatgcctgtagattgtccaacgtaaagttagcccgtattttgttggagcatggtattcacgtaaatggctgtcaaagtccatacgacacctacaaggtatatccgattatggaagccattgccaataagaacatagaactggtacagttgcttttagagtatcgtgcagaccttgaaataaaggatagtaacggcaacactcctttcactttagcaaaagaagcaggttcacaagagattgaaaatttgcttttacaatggatgagataacaaaaggaatactgacaatgcaggataacacacaagccattctctgctaaaccattagatataacagatgaaagcatttctattatattgcttatttctttttccatttagctatgccataacaaaagatagctatatggaacaaaattcaacaaggtgtcattcttcagctgaacaagataccctctatattgaaacagaaaaagcagagtttgaaattatatataggctatgcttgaatcaacaaggtagaaagaatgttgtctacgagttgaaaacatcagatgatagcagcattgattttgtacaaagctatatggtcaatggaataagaaagttggattgttttgttgtgtatgataatgtggcagatggaaatcgatttttattctatgattatgaaagtagggtcattcacatgacaccagcttgcttttccgatttctatccgatctgcagttctgcagatttttcaaaaggggaagttttgttaataaatgggcactctcatttaaaacagccgaacgacacagtaagtattgatagtaaggtgacttatgtaccatttaaccgtaataatcgaattataaaggcaaagttggttccatatacccaagttgaaaaggacaaaatatatcaaacaacggaagatcacatctgacagtaacccactctattccagttaaaatattaacaatacccaacaatgacagtaatcaatttatactgtttttcgcatctttcagtttagacttatacttattcggcaaatgaagatggagaggctgtgcaggacagtaatagattgtattgacttaggcaacagcaggagtaagattgcaatattttttcattggagagactttaacaaaataaaacaaaccactcggttggtttttatatttcttttcatatatttgcgaccatatgatattatttcagtcacatgggcaatgtttataaacagaaaggaagcatcgttctgtacaaggaaaaaaggaacggtacggactatatacggatagagtatgcaaatagtccgactgtcgcgcttttgcttgcttatgatgagggcatagaaacaacgggcagcggctgggcttatatggaagctgcctctttcaaaccagtcgatttccataaacgctactctccctatgctttcattgattataataaggtctattccctacatttcctacagcaacagaattttattcctcctatcgagccggaaaaaactattgaaacttcggattttccgagaaatttgataacagaaggattgatggaaattaccttatctgcacaagggcatctgtcccgcccgtcacgacataaaattttacggtcactccgctccttacgcatggtaggaagaataggcatattatgtgcctttaaggttttgccgacttggagaaaatggtcagggaacagctatgaaattatagaattgctccgaaaggcagaatattatttatggggaaaaacaaatgaaaaggatgtgatagaagcggcagaccgtatatctgccctcgtacaaggatatgattatggaaccaattccgttccatttatggctggtatgtcggcagtgcgggcagcttatgccgtaacggcttccagcctcagtgaagaagtttttgaaaatgacgggcaaactgaccctaacaaatgggatgcagcatttttggcaagtctttcctataataaaagaacagcagatatagaggaaatcgaccccgaattgaacagaaaattttggacgtggtatcttacagactgtattccattcgtttacgaaagtgaaaaaacatccccgatattataccgatacagaattagtatcccgatactggcaaattgcaatgcaatattgtatgacggcatcaaccgattcaactctgcactcgactcatatgttcatgctcctactaacagaaaagagatattgcgtatgcagccgtatgcaacagacgaaaaacttgtccgcacagtagctggttttctgcaaggttattgttgcattccttctaatgctcaagaactggaaaattattgtatgataggacatttctattatgacattataagattctggtattgtgtggctttattggctctatcttcagattctgcagctcttgactgtctgacaagacttgcccgtaccctgatggaacaaggtccgggagatctacatgttttataccgcatactgttgctgctaccggaacagagttctttaaacggactacgccaaggactgtctgattattataagaatacgattccaactcttatagctgcccaatggctggcaaaagcagagattccttatcctgatgattttgaatggaacctatcttttcattttacttctaacggggaaatgtttcccacatcaaataatcaagaagaaaagaaagcatggtatatcctaagagttgatatgtttggtccaagaacgcttttcaatgactacacgcgtttcacaagttatcaaatttatctgcgcaatggtgaccacagtattcatggaagttggaatgaaaaagacggtttccttatacgagatggagaatcattgatggagaatgaacttcatactcctacccttcttgtactcctaatgcacaggctggctgagtatggtatacggttttcgaaagttccggcaaggctgtatactagcaaaggtatatcacggaaatctgtagaaaactggataaagaacgtaatgaaagcgtatgaggatgataggatgcaagaaactcgtgacaatgccctcgatattctcaaatacgaaggagatatagaagatacggtagtagaattgagaaagaagtggggagatgttgtttccgtattgaaggataaacgttttgatgaaatcgtaaaccaatattcctgtttttcacatgagattggtatatctgccttaggacaagaacttacagcttgcggatatgctctttacaatttagatgaagatgatatttatctgttggaactgattccgcaggcagaaatgggagcttttgagaagaaatgtcacaaatacggccaatattgcaaactactcaaacagccgcatcgtgatttcggcatacaagccaggcatattgctccactcaagcagatgccgcgtatgcaaatggtatggcccaatgacaatatctgctatattacaagaggctttgccggttacttcgcctatggggaatggaaacaagaaagcaagacagaatggcaaggaacatttatagtagatttgcgcgttgtccctcttcaaccggtaaaatttaaaacgaagaaaatccatagttttatatattcgaaagaactggacttttatgctgcattgtattctacctctttaggagaaatgcccgttgccggaaagaatcctttggaagcagagaaatggccgcgtgtgtgtgatttgagtgtttacgataaatatgaattccagtggtgcggacattatctttgtttgggggatgtccatagtgctattgttcacacaatgacagaacaaggagtaaaatatgtaagtcgaattattttaccggaaggtttgatatatgctcccagcttcgggatagatggaaaggaaacgttatatatagtaatgggggaatacagccaatcaaaaattatccgatatgatgataatgggaaatatataactatgccattttccatgtccggctatgaaacattccatactggcagcagccctgtaccgaatacaacacgccttcttttgctgcatgaatatacagtaagtaacaatagcggaatatggctggaaccgggattgctcgaccttgatatggcaacacaaagatgccgtatcgctccattacatcacatcggtgacggtttattcagattgcgtatattttacgaggactggatactgatagagggagaccactacacgaacggaaaccgttccgattatgcacgcctttggaactggagcacggatgaagttttgcgtatccgccccggcgtgtttggcagcgaatcattcaaggctcttcatgcgttgcctgacggtactattgtagtaaatacacaccaacacactgatgacatactcagcttgccggaagatttatggaattttcttcgtatggcaagccgtccgaaaaaattaggatattggcttaattacccgaatccctatccaaacatagactatttattgccacctgtatcggaagatgttagcctaatgcttgctccaccatatgtgaaaacacagattaccgggcaacagccggtggagaaaattactccaaaggaatgttccactctgtcggtaacagatggagtggaaataaccgaaggcatattaaaaattaacggtcaaaaaatcagcctgcccttgtcatatacaacaatggtgaatattttcggcagagagaaagtcgtatttacccatcggaatatgcaggacgataacggtaagatggtacaatatgataaacgaagttttcttatttgggacaaagcaggagtaacagctatccgaaacgaagaaaatgtttataatatttctgtcatatatttatgggtggctgagaacaaaaagtctatcttttccttgcctgctcccaccggactgttcgactgtaaaattacggtagacggaaccttatggtccaaaaaggcggatatgactacccgcagtggagagatggaaatcgtagcatccgcatcgggcggttatatggaaattacatttgcccgtacccgcgaccagaaaatcacttggcagaactatcggaagataatggttgaaaacttccagtatgcacttataaaaagagattgcatcaaacaattggagaagaatatccgcataggtaaaccgactaaaaatctgacggaaaacgtacacctgttggaagaaatgagcgaagcatttctggtttgcatgattcaggcccttcatgccggatatgctatgggacgaggtgaacgttatctgaaaagcaatatgcttctgcctctgacagaagcagcaatcaaatgcattgaacatggtacaattaaatcttccgatatgctctccgtatattcgggttgcgtgcttctcaattgcgaaaaaatgactatgaagcggttgagtgaaattatgatgaaaaacggtgttcgtgattttgtatttgacacacttatccgatatcgtattccagattgggaagttacggaatataccgtatttccggaggtaaagaaatggataacttcacaaacgaaaaaccggaacatgacagaagcaagagctgcattacagaaaatttcttgtatttcagaaaatatcctgataacagatgcgctgattacatcaatattttaaatataaatagtatggaaacaacaaaaacaaccgaaaaatttcagagtgtgcataaaacttttagttacactcccaaaagtgcattaaccaatcaatggtcaagcctggcatttggaataggtatggttatcgtgcccttgatttatccttttggattacgtatcagacgggctgtcatcctctctccggaagtcttgtctacgattttgattatttgtggggcgctgctgcttttaatgacattcttcagtatacgcaaggcacgggtattggctgcacagggaggaaccgttactgtggataaaggacgggtgacatatcctgaggtaaataaaaacaaaatcgaatataactctttccttatttccgacatcaactatataaaagacgatgatgaagaaaatcaatttaaagtaagtcttcctgataaatacatcgtattcgagatcaaatattttgcttcgcaggaagattttgatgaattccgttctttatttaattaatcaattctttataacctataacgatttgatgattatgaaaaacaaacaatgccggtgaaattaaaataaaacaataacttttatagcttatgacactatttgtggataaacaaaaaataaccggcaaagaaacggagcagttgttctcagccggaatatcgcttttgctcagcaaggcatatccggctgcttattcatgctttaaccgcatttctgatgaagatttcagtgtgccatacaacaaggcattgtgttgcttcatggtaaagtggcatgacgaatgttacagattgctttgtgagtcggaacagcttatgtccggaagaaatattacccgtgaagcagagttacccgaagcatttctccgttatgaccatgccgaagggcatccttttcatcccatgccgcaaggtattccggtatccttggcatacaggcagttgctgttgttaaaggcagaaacggctttcagactacatctgtatagtgaagtcaagtctatatccgcttgtttgggaggcaaatacaagcatattgagaaactgataaataatataactgacaatgataacttgtgaagaaatatatgacctgcatactactggtgcattggaatccgctttatacgaggcatatagggagattccgcttgacagcagaaacagcatgcggaaaaatgatactcctttgcatatggcttgtgcatttgccgatgagaatgcggtgcgcatactgctggaacgtggagcagatgtaaatgtaaggaatgatgatggagacacaccattatgtgtattggccagatgcaagtgttgcgggaaagaaaccacgattgccggtatcgccggactgctggtttccaaagaagcgagagttccgcgctccggaaaaaatacgaccgccctgattgaagctgtgggcaaccggcattttctgatggcggatattcttttaatgtccggttgccgcattgattcgaccaattcaaacggcgacaatgtacttcacgtcatttgccaatcggccggagacattgcatacgacatcaagcgtacaaaagaaaggatagcagacttctccgaacggtggtattcggaaaaggataaacgggaagcatatgaaaacatggaatatctggaagaggtaaacagacaatgctttctaactgcaaaacgtattttagaaaatgagcaaatagatacggaagacaagaataacatcggaaaaaccgctcttgatattgcttgggaaacaggagcacgcagaatcggagcactactgtccggacaagatcctgatacagatgaactttctgcgctcatcggaggcttggatgtttttcaggcattatggtacaaagatatgatagctttggatgctattttgcgatccggaacagaattgcaaaccgtttgcgaggataaaaagctacacgatttcaaaggcagatcacctttggcctgcgcccttttatgggacaatgccgaagctgcggaaatgttgttgagaagcggggcagacccggacttcaaggatttggaagagcagacagcttttgccgtatggcttaaaaaaagaaaacacggcagtgaaaagaaagaagactgcctgcatcttcttcagtacttgatgcaatgcggatggaatccggaaaagtctgctgataaggaaggtaacacagcattgtctcttgcctgccgggaagctggatgcgaattaggaatttgggctgcccgatatctcatagaaaacggggcagatgtcaatactgttaatttgcaggggcagactccggcaatgaatctctacggaggatgcttttggaatgggaacattccgcgcattgccatcctgccgaggtcatatccctatgaaggacgttattgcacggaaaaagatgccgatatgcttgaaaccctgcttgaagccggtgcagatgtaaatgcaaaagacaaatggggcaatactttgttgcattacattgcaggaagttctcaaagaggagcaaaagaagcggtcggcttggtcatggactttgggaaaccggatgtgaatgccgtgaacaatgaaggaaagaccgttttagacattgcaacggaaaaaaatgacgaagctcttataaaatttttattgaaatattattgagaaaagtatggataataacatgacttttttaaatgcatgccgtaacggacagaaaagcatcgtacagatattcttgaaaaaaggaggtattgatgtaaacaaacgggatgctgagggtaatacaccgttatattatgcttgtttgaagggacttagagacattgtaggccttttgcttgacagcgatgcagatgtctccattgcaaacaactgttcggaaactcctttacatgcagctgccagaagcggaaacaaggaaataataggaaaactggtacaatatggagcggatttggatgcaacagataaggaaggatgtacacctctaatccgtcttctcgacaataaacgttctgatgcagctttgttcttgatagaacagggcgcagatacggaaatagcggataactcaggacacagagcaatagattatgccactgctcacgggttgcgggaaatcgtgatatgcctgtccgtagacggaacaagcgatgcacacggaaacacacctcttcaccaggctgttttcaacgggcagtctgaaacagtccgtgcattacttaccgcttcgaacgacatgttgaacacacccaacgatgagggggaaacgccgctgattattgcttgtatgaaaggaaaccttacagtagcgaaactattgattgctgccggtgcgaacgtgaataagtctcttttgaacgggaatactcccctacactttgcagcctggtcgggaaacaaatttattggccgggacttgataacggcaaatgcacaagtggatatgcagaacgaacatggagaaactccgctcattcttgcagccagagaaggaaataacgagtttgtcgcatttcttgtggagcatcaggcaaatgtgaatctggcagataatcttcaacggacggcattgtattatgccagtgagcgcggatacaacgaaattacggaaattttattggcggcaggagccgaaggataatttataaacatcattaagaagtaaacggatatgacaaaagaaagaacagcccctcaaagtcctgaggatatggcaaaagcggcacaggaagccgcggtaaaggcagcaatggaacaggcccaatctatgttcgggagcattccgggatttcagatgccggagggtatgcaggaacagataatgacgcaaatgacagccggtattcccaatatggcagaactacaggcacagcaggaagcgatgctgaaagcagccggaatcggtatggaaacggtagcggaagcaggacggcaaaacatagcatttgcccaacagatgatgcagggcttttatgatatggagaatctgaatgaggaatggactatcagcaaagccggtgacggtaaactggatgcaggtcagcttcgtctgttggctttcggtgcgcctatgttggtatataatgacgaaaatgtagacactattgattgcgaaaacgatattgacagtatcaaatgtacacttcgggaatggtggaatgtgacagaccgggaaagtacactggatattgtgcgatggctgcttgaggaggggcatcatgccgaagcagaccgggcattggcaaaaattcgcaaacgcggattggaaaacatatcggcagaggaacactgtaatggggatgacaagatggaagatgtttgtttgattgcagaggaaatgcagaaaaacggctggtgtcctgccgggcaaatgcctcagagtgtcatcgcttgggatttggtgcgtttggtgaacctgggacgttgggcatatctttgcgattatatccgtgaagatgagatgtggcatatcatgcaggtagcggcagatactgcgctcgaacacttttcttcatgggaagaatacggacggagtttcatcatggggcgtggagtatggcatggcgatccgacagacagcgaaacagcatacgagatagtagagctcttgctgaagaacagtgaatcaccctggaaacagtctatgtggaaagaataacggcagaaacctttataagtatgaaataatatggacaacaatttttggatatccgctgcaatagctgctgttgtgggtggggcctggcttttcaagaaagggaaaagtgcatattcatttatcagaaaaatacgcaggtcttttaaaggcgtatgtctgaaccctaaatcaagattgaccgacgagcaatgcaagaagattgccatcggtgctatgtatgcttctcagcaaggagcatatcaaaactcgatagaaaccggtattcccgatatgcttcccaaaatacttggagaatggtggggaattgagactacggaagatgcccggaaagaactggactatctttgccaaaaaggataccggtattattttccctttgtctaccaagcattcctactggacaaaccggaagaacaagatgaaatctttcagcagaacatgacttctcaagaagattacgacaagattgtcatgcaatttcagaatttgcaggaaacctatgaggaactgctttcctgcaaagtgattgtgagcaaggaagatttaaagcgttatggcgttgccggttgggatgcgggacgaatctgcttccttgcccgtgcttgctgcgaaatggactacatctccgaagcggatgcctggagatacatagatgtggcatacgacatggcacattcggcattctcttcgtggaatgatatggctatgagctatgttattggacgttccttgtggggaggaaaaagtgcatacaattctgtaatgaaaagtactgccgatgaattgctgacacatgaaaacagcccgtggagaaaacacgtttggtaaacaacttttttacaactctactttagtaagaaaccggcttttcacagataccgcatatctgtcttgtctgtatgaaatgcggtttcttctatttataatttcaattataggacatatatcatatatgtagcacaagaaaaagaataacacaagcaataatatattataacttgtgtttacatttattttatataatttaattatggcaacaggattcagaccgaaatatgagcggacaatagagttagccggatattcatccgaagagctgatgcttcttgccattgaggcatccaaatctctcggttggcaagcgggcagtataaaacgtgataaatcagatttttatacgcctacaagttttagatcgtggcaagaaaaggttattctttctgtaacagacgggaaggacggacaacttcttgctacaagcatatgcacatccatgcagttcatggactggggaaagaacaagcagaaccttaataagcttacagctaccatgcagcagttgcaaaatgttcataatatctctccgacggaagccgatactgtaaataaaaccacgtgtgcatatactccggaagaaaagaatactgtcattgctcatatccgtcacttctatggaggtattaaaggcatcacaaaaaacattgtttcaccgtcaggagtggaaatcctcattgttgaaccaacaagcaggtttgactgctatacattggtaacatgtggagcaggtgcttctgttatgccggtgccggataaagcaactccttcgaggtgtgaattctgtatgtgtatgccaccaacatggaatacagaagactcatggccgattgactggcttttgcaatgtgtctcatggcttcaacaagggaattcctggcttgcatgtgggcattcgctgtccgatggtacaccgttgcaggatgatactctcatgacatccatgttgcttaccattcccgaagaacgggacaaaggtgcggaaaactgtcaactgcccaatggagattctgtggctatttaccaactggttcctgtatatacggaagaagttctgttcaaacaagccaatggcatcattcctttattggacaagatgaagaatgtatcatatattgtcgatacacacagagaaaacacatgtagaaatttttctgcttttgaagaaaacggggatagttccataagcatggatgaaaaagcgaatgcttccttacgttcaatactgacaatccgtaaagggaatatggcaacacccctgcttgtttatatcaatattgccctatttgtcatcatgtcgatatgcggagtgagtctgcttgctcccacaggaatatccatcataaaatggggagcggatttcggtccccttacacttaccggtgactggtggaggaccattacctgtaatttcattcatataggagtgattcatgttcttatgaatatgtacgcactgctgtatatcggaatattcctggaacagcttatcggcggaaggagacttataagcgcatattttctgacaggattgttttcggctcttgccagcttggcaatgcaccctgaaaccataagcgccggagcttccggttcgatattcggactttatggaatattcctttcttatctggtgttccatcacaggatagaaaaagggcaacgcaagtccttgctatacagtatcggtttctttgtattctataaccttatgtccggtacaagagcagagggcatagataatgccgcccatattggcggacttgtgtccggaatcatattaggcatcatatacttgctgactgaccggtttgcaacgaggaaaacctctaccctctttatatcgattacggaaatttcttttgtgctgatctttacggtactttttgcaggacagacatccaacctgccggcagattttatagaaatcagggagatgtgggagaatggtacacttgaagaatacgcacaaagcgtttcttctgaaaaagatactattgaaacagatcccaacacctcgtactatatgccgcaaaatgcaacggatatttccactttcaccggaagtgaaacagatctgggcaatggaatgaaagaatacatcactactgtcccgtaaaagtggataaatagttctttgaaattattgaaatatagtcaattacacggttttttgaaatgaaacggacttgattttgcaactttgcagtctaatacaaatggctgctatgttccaagacaaatacgtattctctcaattaaccgcttttctgaacaggactcagttcaacaactatgttcgcaagtatgatggcaacagatatgtgaaacatttcacttgctggaatcagatgctcgcgatgatgtttggacaactgagtaaccgtgagagcctgcgagacttagtcgttgctttcgaggcgcatagggccaagcaatatcatcttggtttaggtcgtgaaccgatagccaagacaactcttgcgacagcgaaccagaaccgtgattacagaatcttcgaagactttgcattctatatgatgaaggaagcctgcgagaagcggacgaccaacatccttgacatttccggaaagaaatatgcgtttgattcaacaacgattccgttgtgtcttgcaacattcccatgggcaaagttccgaagcaagaaaggaggggtgaaagctcatgtcttatacgacattgaagcacaagttcctgccttctatactgtaactactgcatcaaagcatgattccacagcaatgtcttcaatccattatgaaccaaatgcttattatatattcgacagggcttatgactcctttaaagaactctataggatacatcttacagactctttctttgttgtcagagccaagacgaacttaaagtataagacagtcagatggaagcgaagaatgccaaagaacataatgacagatgcggaagtgaaactgaccggatatctctccgagaaaaaatatcctgagtcattcagactcgtccgatattacgacgaagaggatgaccgtgagttcacttttttgacgaatgcaaaacaactttctgcactggatgtcgccgatctttataagaaaagatggttaatcgagctgttcttcaaatggctcaagcagcatctcaagataaagaaattctggggcacaacagagaacgctgttcgcatacaaatcagtgtggctattatcacgtactgtcttgtggctattgtccaacatgatatgaagttgaaacgttcaacctatgaagttttacaaattctcagcatatcattgactgacaaaacccacttgcgtgacctgttcgacaagactaatttcaatgatgtcaaagatctaaatgatcccctgattccggggctttttgattaattgtttaactcgtcccattttaacgggacactaatgagaatacataaataatagctgtggcttcagttgccaatatccgtcaacttgggaaacaataggaaaatccgatacggaacagatattgcaacttcgaggacatagtgtcagcagtttaaccgtcagctacattaaagctccttctaagggagcaatggaacatatgtatgatttattgattaattccatgaaagagtcccggtcagaaaacataaatattcatggaaaaacattcgaaaggatttcgggaaagatggaatgcgctgtagcaggcggtggaagtatccatataaatcagaatattgttatccatatgaatgaggagacactggaaaacttcatcattacttccacaacatctgatgacagttctgaatccgaagttcaggagattataaaaaccataagaataaattagactgtgaaaaatataaagtattcaacgcttatgaggaaaagactattatctctgctgttcctttcactttacgggagtatgctctttgcacaagagccactggatattaacgatgtggaacgagttccattgggagattttacataccaatggcggaatatatatgaccgtactccactacatggaaagtgccggattatattaagctacaggtcttacacgatagcacatttcaacaaggatggcattctcgatggattatatgaaaaatatgaagacaatcatcttgtacagaagctgacctatgtaaaaggtatactaaggggaaaagggtatgaatactatacagacggcactgtgaagaaagaatgtgtctggaacgaacaaggcaagatagacgggttgatgatagaatacaaccggataggaagaacggaatgggactacaagaatggcgaagtggacggacaacaacgaacatttgacaataacggtcaattaatcacgttcgtttcgtacagcaaaggtatgcagcatggtcctttccgcatctatgaagaaggcggtactgatatgtcgccttttataagagaggggtatgcttggggatggcgcggcaagaaaggcgaatataaggaaacctgggcactgagcggaaagccgaaatgtatagagcattacacagagaaaggcgagaaaaccggccggtggcaggaatgggatgaaaacgggaaacttgtccgagaggaaaattatacggaaatgccatattattctgtgaaatttgacaagaatagctatccgttagaacggtactactataatgaggacctgtcggtgaagagcatacaggagttctatcccggaacggacaagataatgaaagaagaatataatcttgatttcaaaaacttcaagcgtgactatcgtcagttttatgaagacggtacaatacaggaagaagggcatatgaaaggcggagaagtggtatttgccaaagaatactataaaaacaggcaactgaaatgcgtcaaaaagatacagaatgtatatggatataaaattctcaccgttacggaactatatgatgaatccgggaagccgttacctattccctccggtacattctaactaaaaagcagatttggattattctgcttgtttcaaattaaggataatgccggtatcgtgaaaaggcgtcaaaacactggcacaacttttttgttatatatctatgttttagtatttttgtaatcaataggcagctatttctaatttataaaaaatatactctatatggataaaggtataaaacaagttgtgattcttttggcacatcccgacattaaaagttcgcaagccaataaggcattaatggatgctgttaaagaaatggaagaagtggcaatatacaatttatatgaaatgcgtccggaagatgcctataatattgatttatggagcaagattatatcgcaggcatctgctcttgtgtttcaattcccgttatattggatgtcggctccttccttgttgaagaaatggcaggatgaggtatttacttatttggctaaaactccggctgtggcaggaaaggcattattggtaacggtcactaccggttccgaatacagtgcatatcgcagtgggggaagaaacaactttacaatggatgaactgttaagaccttatcaggcaagtgccctacatgccggaatggtatggcagacacctgttgtcgcatacggaatgggaacggcagatgccgggaaaaacattgcagagggagttaatgactacaaactgaaaatagagtccctaataggaaagagtcacgtaagcggtgattggtgatactccaatggcaatgcccataaaataacagaaccaagcatcattcgtctgaaatttcgaatggtgcttggctgttttagtaatcggcatattgattttacctgtatactatccctttcatttgcagcatggtaaaatcctcttcacgcattcctatatcgttcaatgaacgggcttcattatggtcattgaggtatactctatttttttcggtatatgaagcatttattacagacaatgaatcgtttcggctgggtgtgtctatgccacctaattccagtatcgtctggaagaaagacgcactggatgaaatatttttctgtcggtttatctctgcattttttaaaaaatccggataattcttccgataattgtcggacatccataccagaaaaggcacgtgtatctgataataggacggaacgggtgaagcatgcagaaaaaggtgacggtcatcatcaaagatatcctctccatgatctgaggtataaagcattgccgcatctatgtcctgttcctgtaacatccggatgagacgagccagaaaattatctgtataccggatagaattatcataagcatttatcagattatccttatatttcaattctgcatctaccggaaaatcaggcaaaaagaaagcgtggtccgccggatagcgttcccgataattaaaatgggaaccataggtgtggagaacgataaattgcttggaagcattttctgccaactcggcggctaccagtttcaaaagttcatcgtccgaaggattgtaactgccatctcctgcatcttctttaatgaaatcgcatatatcggcttcttttccaaagaaatcgatgaaagaatggttatagcgttgattggaaaagaaagcagtccggtagcccgcttccttaaatgctgtgataattcctttttgccgatagatggaattgaagtcgtgcgccgtaaccgaagacatcagcatagggacacttttgtgcgtagtattggattctgtcagtacatgagagaaggctgtcaatccttttattttggtaagttccggattcgtattgcggttatacccgtaaatagaccagttagcggcacgggatgtctctccgattaccataacataaacttccctattcttctccggacgggtggtttttgcctgaaaagtaaaatctttagaggtttccgcatagtgttgcgtctgtgcagtacgttggaaggcaagtgcaatattataacatacgtttgccggatacaaatccgatttcaattcataacgggcatcaaacagataagcagctaccaatgacagaattcctgcaatgaccgttatccgggcacgtttacgttctctgcgaacaaacgtttccgatagtctccgtttcttgctgacggccaccgcagccaaaaccagcgccggtatatatagcagcacaacaataataatggcgggaatcaggttgtccagcaattccaaagcctcaccgggatttgttgtcaccagattgagaaacatatctactgcaataacagactgtccgaaaagatatagcaatacaatctggaatgctccaaaaaacaggaaaggaaacaatatccaaaaagtcttgccacaatttcccgaccaactcattatcatgtgatatatggagaatggaagcaatacattgcacaccttcgccacaagtggcataggttcagtaaaacatagtacgatattgggtactatcagaattatcaggaacaagtaatacaagttctcttggttttcaaaccatttttgaatttttctaaaaagcttcattgatattaaatataaatccggtctgatgtttgccaaaccctaaatccaaacgtacattcaccctctttttaaattcccagcgatagccgaagccataattaggaagaatatgcttcacgtcaaactcggaaaactttgggaaaacagttcccgctcctacccatacagtcactccgtttcgtttccatacatgctggcgaagctcaatctgagcatccatggcacatttgtcacgataacgcccttcataatagccacgcatggaatacgaactgcctaaagttgccaacagtccccaaggtggatttccgtaattgagcagtgtatgaaactgccccgccagaacgccgcctttccatatggtatgataatacctcgtatccagttctgtactgctgaaagcatatttatttcccaaaaatgccggactgaaacgttggtctatcctcaaatagtatcctttatacgcatttgtcaggaagtcgcgcgaatcataaagcaacgataaacctacacttagattcgtagtatgcgtgctcatgccttcccacagttccggtttttcaaaaccatgtccgtatacataatcgaatacagccatgggacctacgtagaaattacgtgccaaccggaacataaagtccactttcatctgtgcttgaaagcggtcataatcgctctcattgtcactgttggcaccattgtcgtatcctgcaccccaatacagactgggaaaagaatagaaatacagattgtagttcaaacgatacttatcatgaggaaacaaatgcgttccacgtactcccaacagatagaagcctaccgtagaaacatctccgtacaatgaaacattggaaggcggcagaatcgtatcgttccggtcagaacggtaaagccccgcagccaccaatcccaaccctaatttggtatcgctggagtagtgcggtccgccgataatgctaaaatcgaatttcttatttttcttttctttattggcatcgttaaagtaatccagaaattttctaaaaaagttccgctttacaggaacagaatcaagaatgatggcagaatccatgtctgccgaagtatttgcttctgccaaacgtgtttgtgcatgcacagcagttacagtcaccaacaagattaaagataacagacatccttttaattttgtgttcattctctattattaagaaaacctcgaaacaaagttagttgtaaataattcatgttacaacaatgttacggggctttttgtttccgtttcttcctatttaatgtctgttatttccttaaagtattgtgggcgtaaagaagcgacggaaataaacatttattcattcttatttgttaagaacatatatcaacttaaaaaaacgaatgattatgttaaaacgatttttatttcctaccaatccgaatggcgtttttatatctgttatattattagtagtcagaattgtattcggtattctgatgatgaatcacggtattgataaatgggcaaactatcaggaactttctacggtgttccccgaccctctcggcatcggcagtcccctttctctgggattggccatctttggcgaactggcatgctcaatggcattcatcataggcttcttatacagattggcaatgattcctatgatatttacgatgtgtgtggcattcttcattgttcatggcaatgatccgtttgcggtaaaagaacttgcatttgtttatttggtggtatttgtattgatgtatattataggaccgggaaaatttgccgtagaccgctggatttcccaatctctttctcgcaaatagaaataaataaggctcttttattttacagaatactgttttttccagcttttttaatgtctatgttataaaaatggttatatttgcactagtatatataaatattgagattttatctcaataaaatacagtaaaataaaagaaagttattatgaaaaagttcaatttgaaattggctgcaactgtaatggtatgcggtgcttttcttttcagttcatgtatcggttctttcggattgcatagcaagctgttgagttggaacgaaggtattggaaataaatttgtcaatgagcttgtttacctggcattcaatatcattccggtatatggtatatgctatttggcagatgctttggttatcaattctattgaattctggagcggaagcaaccctatggcaagcattggtgaggtaaagaaagtaaaaggcgaaaatggaaactatctggtagaaactcttgagaacggttattccattacaaaagaaggcgaaaccgcatctatggaattaatttacgataaagatttgaatacctggaatgtagttgcagaaggcgtcagcactgaacttttgcagattaacaatgacggtactgcacagatgactttaccaaacggtgaagacctgaccgttactttggatgcgcagggagtatctgctgcacgtcaggcaactatggtcaatacctattacgctgcacgttaagagttgaaacaagataaaacagaaaggctgcgcaatgttcgtcaaagaaccgcgcagcctttagttttttcagacggatatccgcttggcatcagaatggatatcctaccgcaaaatgaaatgcaaaatcgcggctgaatttaggatgtataatagggaaatgctcctttttagtgttatacaccggattgacagctttcataccaccgtcaaagcgcaggacaaagaagtccagatccaaccgtaggcccaatccgtaggctacggctatctgcttatagaacttattgaattcaaacttcccgcccggctggtctttgtaatcgcgcaaggtccagatgttgcccgcatccacaaaaatcgctcctctgaacttccagaaaaggcgtgtgcggtattcgatacttgcatccaacttaacatctcccgactgattcatgaagtttccgtcaccgggaaacacaccggggcccaaatcacgtaccgaccagccgcgtacactgtttgcaccacctgagaaataacgcttttcaaaaggcacaatcgttgcattgccgtaaggaacggctatgccggctcccacatggaatgcaatggaattgcggttgtctataacgatattcttggcaaaatcgaaatcccctttgacatattgtgcgaatgggatactcagcaatgaatactccccgtcttcattcttcttcatgtttgtcattctggcaaaagcatacagaagattaccggcagactcaaaattaaagcgaatagaatatgagttgccgatgattgcattattcatcagggcttgtcctgcgctattgtatgtatagctgtatcctgtgcggacaatcaggcggtcgtcgtagttgtattttaaaatatagttctgttcgttattcaaatatttgtcgcggaactcctgcgaaatggaaggcatatacaggtagttgatatccagcaaatcaatgcgatgctgagcacgctgacgttgcaatccccatttgtaactccaattggcagaagcaatgatgcgtgaaaactccggacgtatctgataattatactgtacgccaaattccgtagtagcacgtatcttcctccggaagtcgttggaaagaaacggaaagagaaaccgcggaaagttgatcgttgcttccgcccctaattccgtatagtcctcgtggttatatccgccttgcaagccagataccgcttcgtaagccccccgcagctttatcataaaagtctcggaacccttgaacatattccggttctgaaatgatacggatgcggcagctcccaagtctcctgcggagttggttccttccaattcaaatgatacggactggtatttgctctttgtcagcattacgtaggcattcaatttggctgtatcgcctacctgcgtttcaaagaaacggatattggtatatttcaatgcctgcaaacgtccgaaattggaataggtacgttgcacatccggttcgttgtacaaactgcccggcacaatactcagattattagtcagcaccttcgggcgcaaataaagtttatccttataatatatgggaaaacccttgtaatgtacggagtcgttgatttctatgctgctcaaagcagatgattccaacacattataatccgttataaaatttaccttgttgatgtagtactgccgatgattttgcgggctatcgtcattgtgctgccgaaaaggcgccagatgcatggttacatccacctggtaggtattcctcaccgtatctgccgtgtaagaaatatattccttattgaatttataatatccgttacgaagaagattgtccgtaatgcgctgacgttctgcatccaaacggtttacatcgaaatacattccttccgtcagataagtacctgccgaatcctgccgcatatattccctgattttcccgtctctgatatcgtatttaagagaacgaatcttataaggttttccactggacaccttataggtcagcttcagcttcttcttctttatttgtataaccggctctacggtggcgctcatatagcccatattttgtacggcttttttcatttcctcaccggagcgcttcgtttcttcttccttatagatgaccggagcgtcccctatgcgccgcaaagtacggtttatccaacgtgcagagtctctgcctgaccagttatagacatacaactgtgtctttatcaggctgaaccatttggcattcggattctggcggacatacatcgataggcctgaaggcttgatttccctgttgtccgtctgtatgcgcacctcgtccaacaaatatgaaccttccggcacatatttcgtggcagaacatgaagcgaataagagtacggcggtagcaaatagtgcgtagcgaaagcctttcttcatactaagttattaattgcgcataaaatactgcaaatatagaaataatcatgtacttttgccaaataaaaccgaacaacttatggcactgagcaagaatcgcattaaatatatccgttcactggaattgaaaaagaatcgcaaagccgataaagtattcctggcagaaggcccgaaactggtaggagatttgctggggcacttccgttgccgcttcctgattgcaactgccgaatggctttccgcccacaggcatttggctgtggaagatgtgaccgaagtttccgaagaggaactttcgcgcgccagcctgctgaaaactccccaacaggtactcgccgtgttcgaacagccagacgaatctgtggatgtttccgtcataagccgctccctttgcctggcattggacgatgtgcaggaccccggcaatttgggaacaatcatccgccttgccgactggtttggaatcgaacatatcttctgttcgcccaacacggtggatgtctacaatcctaaaaccgtacaggctaccatgggcggcatcgcacgggtgaaactgcattatacttccctgcccgaactgattgcttcactggaagacataccggtatacggcactttcctggacggagaaaacatgtatacacaaccgctttcggcgtacggactgatagtaatggggaatgagggcaacggcataggagatgaagtggaacggctcatcaaccggaaactgtacattcccaattatccggcagaacgcgaaacttccgaatctttgaatgttgccattgctaccgcagtagtttgtgccgagttccggcggcaggcagcaatgttgcagtgtcaaaattagggaaatagacaggcattagtccgcaacttccgtcaataaaggatggcggagttattaataaattccgagaagcgtttgtcaaggagaaaattgtgtcaggttcttttaactcattttgcgttaaaagaacgattgctcccggcagccattccacattttctatctcttcggtcaatggaaataaacgtacaaccatcccctcttccgtctctatcgcatattgtttgagataaccgtatgcgggcaggaataaaaaatgtgaagcgaaacgtttcattgtttttctgtggtttggagcaatcttggacgcggacgcctttcagagcgatgacggacagtatctttcttttcactctgccgcttcagttctgccggtttgcccggaacgggttctttcttcagttctttgtcgcctgcctcaaggctatctgccggagccttgaacaaggtatcctttgcgtggtagcgcatcaggctgatgcggtctgccaacacatcccgtgtggattgctgtgcaggataatagataaagcctcgtatttcttttatttctcccaatgtgtcggcaaataaagaaatagtctccgtgcccgattgctttaccttgagcatatcgttcagcgtatctttggcataaagaacctgcattgccattaaaggtgcgtgcagactgtcgggtgttccgttcaggaaacggaaacggactgtccaacgcagcgtatctctgtccttgaaattggtgtccgaaggaagtgtgaaagtcagtttgttatccatcggagttccggtaagataacagatgtgccggcctctccatacgtctatactgtcgcccggagaagattctttgggcttgttgtcgcgcaaggctattaaatgattgataccgtccctctcggctttcaaccgctggtttactttttcgtagacttttgtaagggcatccggatggcgggcataccacaccatggaagtatcgaagtcggcctgggtaatgccgtgtttcctgtaaaccgattcaatgtacagcacacgcttataactttcgctgtaaggaacctcctctcccattgcctttgcaatgtggaagtcataaagtacgttttccattttggcgtccgatataaccgtatcaggtcttttaacctgacatgccgtcagaccgaacgccagaaggattacgctataataccattgaatccgtcttttccttttcatgatttctttataacatgataggaatcattcaaatacttactgtagaagagcaacagcgctatgataccgcaactgattgccgcatcggcaaagttgaaaatcgggctgaagaagatgaaatggtctccacctatgaacggcatccacgcaggccagtttgtttcgataatagggaaatagaacatatcgaccactttaccgtaaagcagcggagcgtatccgccgccttcgggcataaaggttgccagttgcgaataggtgctttcattaaacagcactccgtagaatacgctgtcgatgatattgcccagcgcacccgtcaggatgagcgagacacagacaataaaccctgttttcattccatgctttatgaacttgtacaggaaccagcctatcactcctaccgcaacgattcgaaatgaagtaaggaacaatttcccgaatatctccaaaccaaaagccataccgttgttttcggtaaaataaatgtaaaaccaatcggtgatgcgtatgctctcatgccaatacatgtgcgtctttacaatcaccttgattacctgatcgataatcaataccgagaaaataacgagtaaggctatccgccctttcgtgaaaaaattcttcatccttatttcttgccgttgtttttagcttcgatgctcaatgtagcatgaggcactgcacgcagacgttcggcaggaatcagcttgcctgtttcgcgacagataccatacgttttgttctcgatgcgtaccaaagcggcctgcaatccttggataaacttcaactggcgttgtgccagacgggtcgtttcttccttggacaaggtgtttgccccttcttccagcactttgtacgttggagatgtgtcgtcggtgtcattaccgtccgcacctgtcaggctggctttcagcaactcatagtcgcgttgcgccaactccaacttttccagaataatggcgcggaattcttccaattccgcatccgagtatcttgtcttttctgccataactttacgtgtttaatcgttagtattaataattcattctttcacaacgcttacatacagtctgaaatcgtcgaattcgagttccgttccgccttccacattgtccgtcagcgtcagtgatgttcctaaaacctggttacaaatatagtctttatattcatttaccgcatcatccgtttgcggattttttgataatgtaatctttattttgtccgttatctcaaagccgctcgacttgcggatattctggatacggttcaccaattcgcgggcaataccctcgcggcgaagttcttcggtgatggtaacttccaaagctacagtcagcttgccttcattggccaccagccatcctggaatgtcttcactgaagatttccacatcggatgtctcgattacggcttccgcaccgtccagattcagcgtataggaaccgttcttttccagctcggcaatggcttcctgcggcattccggcaacggctgcggcaacggctttcatctgcttgccgaatttcgggcccagcttcttgaagtcgcacttcactttcttcacaagcacaccggctgcaccgtccacaaacttgatttcctttacgttcacctcgttcatgataagtgcttttacggcttcgatgtgggcgcgttgctcttcgtccactaccggaaccatgatgcactgtagcggttggcggactttgatgttcaccttacggcgcagcgccaataccatagaagtaacgtcctgtgccatttgcatgcgtgcttccagctccttgtctatcatctcttccttgcattcggggaattttgccagatgaacggagacaacgttgtcgcgtccggtagctgccgtcagatccgaatagagcatatcggcatagaacggagcaataggcgccatcagtttggctacggtttccagacacgtatagagcgtttggaacgcggacagcttatcctgcgtcatgccgccgccccagaaacgtttgcggttcaggcggacgtaccagttggagagattgtcgttcacgaagtccgaaatcagtcgtccggctttggtaggctcgtattcgttgtagcagttatccacatccttcaccaacgtgttcagcacggagataatccagcggtctatttccggacgttccgccatgggcacatcggcttccttgtattcaaatccgtccacgttggcatagagggcaaagaaagaatacgtattatataaggttccgaagaatttgcggcgcacctcttccactccgtctacgtcgaatttcaggttgtcccacggagaagaattggtaatcatgtaccagcgcaaggggtcggaaccgtatttctcgatggtagagaacgggtctacggcattgcccaaacgcttggacatcttgttgccgttcttatcgagtaccagaccgttcgatatgacggctttataggatatgctgtcgaacaccattgtggcgatggcatgcagggtaaagaaccagccgcgtgtctggtccacaccttctgcgatgaaatcggcgggatatacctggtggctgtccaacagttccttgttctcgaacggatagtgtatctgcgcataaggcatggagccggagtcgaaccatacgtcaatcaaatccgattcgcgcttcatgggtttgccggctttggaaacaaggacaatatcatctacataaggacggtgaaggtctatcttgtcgtagttttcctgcgtgtacacgcccggctggaaacctttgtccttataaggattggatgccatcagtcccgcagcaacggatttctctatctcgttgtaaagttcctctacggattcgatacatttttcctcgtcaccgtcttccgtgcgccagataggcaacggagtaccccagtagcgcgaacggctcaggttccagtcgttcaagttctccagccacttgccgaagcgtcccgtaccggtactttccggtttccagttgatggtcttgttcaactctatcatacgctccttgcaggcggtactgcggataaaccagctatccaacgggtagtacagcaccggtttgtccgtacgccagcaatgcggatagttgtgcacgtgcttctctatcttgaatgcctggttggcagccttcatcatcatacatatatatatgtcgagagtctcggcggcctgagcggctttttcgtcatacttaccgttgacggtgaattgcgggtcgtaggcattcttcacccagcgtccttggtattctttgtaggcgtctacatcgacacactcttttacgaatctttcgtccaattcgtccagcagatagaacttaccggtgaggtccaccataggacgggtctcgccgcgcttgttaatcatgaacagagaaggaatgcctgccgcacgggctacgaaagcatcgtccgcaccgaatgtgggagcgatgtgtacgatacccgtaccgtcttccgtggttacataatcgccgaggattacacggaagcctttgtcgctgacactccaattgccgtcgttgtccacctctaccggtttcacccacggaatgagttgttcgtattccattcctgccaggtccggacctttgtactcgcctacaatcttgaacgggataagtttgtctcccggcttataatcctctaatgcaagctcttccgcttttttattgaagtgagtatagagcaatgctttggcaagtaccacggtcatcttctcgcccgtatagccgttgtaggtctgtacggccacgtagtctattttcgggcctacgcagagagcggtgttcgagggcaatgtccacggagtcgtagtccatgccaggaaataaggagtaccccactccgacatttcgggtttcgggttcttcatcttgaactgtcccactacggttgtatcctttacatcgcggtagcaaccgggctggttcagctcgtgcgagctcaagcctgttcccgcagccggtgaatacggctgtatggtatatcctttataaaggagtcctttcttgtgaagttgcttcaacagccaccacaacgtttcgatgtaacggttgtcataggtgatgtagggattctgcatatccacccaataacccattttgtgggtaaggtcttcccactccttggtaaatttcattacatccttgcggcaggcggcattgtattcggcaacggaaatagtcttgccaatatcttctttggtgatgtcgagcgccttttccacacccagttccacaggaagcccatgcgtgtcccatccggctttgcgcttcacctggaagcccttcatggttttgtagcggcagaaaatatccttaatggagcgcgccattacatggtgaatacccggcatgccattggccgagggcggtccttcgaaaaacacgaaagaaggacaaccttcacgttctgtcatactcttggcgaaaaccaggttttcgtcccatttcttcaacacttccttatttatttccgaaaggtcaaactttgaatattcggcaaacttcttacccatcttgatatttacgatttgactatttacgatttactattttttctgaagatagcccggaaaggcttttccggtgctttccgatgctatcctctttattttaagggtgcaaatttacaaaaaagttagagaaaagagatttttgagcggataattttaagatgagccgcctgcgtctctcgctttacttcttcattttcacttcatacaagtcgtttctgcggtctttcaggttgcggacgctgccataggtatgcagttcgttgagcaagtccagatccacatcggacaccagaatcatttcggtgttcggagttgcctcggcacgctttccgtcggtagggaaagcgaagtcgcagggggtgaacacacccgactgggcatactgtatgtccatgttgtgtacacggggaaggttgcccacactgcctgctatgaccacaaaacactcgttttcgatggcgcgggcatgggcgcataccttaacgcgcgaataggcgttctgtgtgtcggtaaggaaaggaacgaacagtatctgcatgccctggtctgccatgatgcgcgaaagttccgggaactccacgtcataacatatcagcacaccgattttggcgcagtccgtatcgaacgtctgcaaggatttgccgccactcaatccccagctcttgatttcgtcaggagtgacgtgtatcttttcgtacatttcgtacgttccgtcgcggcgacaaaggaaacctacgttgtacaaacgtccgtcctcttccttgataagcggcatgctgcccgtaatgatattgatgttgtagctgatggccagcttcacaaaccgctctctgatttcgttggtgtaagccgccagtccgcggatagcttccgactctccctcgtcattgaatttggccatcagcggcgcattgaagtattcggggaagagaacgaagtcgctcttgtagtcggaaacggcatctacgaagaactccacctgctcgaacaaatcgtccagcgtcttgtaagtacgcatctgccactgcaccagaccgacgcgcaccgtcgttttcggacttacatactcctgtgtaggcgcctggtaatagatattgtcccattgcagcaggcaggcataatgcttggattcctcatcgttgggaagatagttgcgcatcaccttgcgtacatggaagtcgttgctcaactggaacgtcagcaccgggtcgtatatctccttctgctttaccttatctatatattccttagggcgcaactggtcggcatacttatgatagttggggatgcgcccgccgaacatgatagctttcaaattcagtgtttcgcagatttccttgcggtattcgtacatacggcgtgccaggcgcagtccgcggtattgcggatggataaacacctcgatgccgtaaaggatatttcctttgggattgtgcgtattgaaagtttccttgcccgtaacctgggcataggtgtggtcgttcttcacatcgtcgtaattcacaataatggagagtgcacaccccactatcttttcatcgaccactgttacaatctgcccttcgggaaagatgcggatgagtttctctatctgcttgtgcgtccagaaaacatcgcttccatccgaataaacgcgtgtgaatgattgtgccaactggtcgtaatcttctatctgcaggttacgtatctgtaccttattaattttaatttcgtccataattttcgtgttatacctgagtttaaaacggtgcaaagttacagttttacttatacattaatccctatgggatatgattttttcctacctttgctgccaaaacaacatttatctctgtaaacgttaaatatagattgagacatgcaaagatttattacactggtattcagcacctttcttttgctatcgctgaatgcggcaactcccgaaacacattacaccgttattgtttcactcgacggttttcgctgggactatcccgacatgtataagactcccaacctggaccgcatggcggcagacggggtaaaggccgtgatgcttccctcctatcctgcctctacgtttcccaatcactatacgctggccacgggattggttcccgaccatcacggcataatcaacaatactttttgggatgtaaagaacagacgccagtattccatgggcgactccgccacccgcaacaacccggaatactatttgggggaaccgatatggataacggctcagaaacaaggtgtgaaaaccggcaatatgtattgggtaggctcggatattgcgattaaaaagtctcatcccacttattacagaccttggaacgccaagccttttctgacttttgaacaacggatagacacggtgctcacctggttgcaaaagcccgaaccggagcgtcccagactcatcatgctatattttgaagagcccgacggaagcgggcatcacaacggcccgtgcagtttgcctaccggtgcggtggtccaacacatggacagccttgtgggggtattaagaaaaaagatagaagctcttcctttcggcggggacatcaatcttatcgtcacgtcggaccacggtatgaccgacatcagtcccgaacgggttgtcaacataaacgattatgtaaaaccggaatggtgcgaagtgatagacggacgtacaccaacttccatattctcgaaaccggaataccgcgactctatctgcaatgctctgaaaaaagcagctcacatccgtgtgtggaaaaaagaagagattcccgccgaactgcattatggcagcagcgaccgtataggcgatatcgtagtggctccggaactgggctggcagtttacggacgtggcacgcgacaccaaaggcgctcacggatattttccccaaagccccgacatgcaggttatgtttcgggccatcggacctgatttcaagagaggttacatatccggaggatttgtgaatgtggacatctacccgctattgtcgcatcttctgcaaattgttccggaaaagacggacggacggttcgaacggataaaggacatattacggtgacaaacagtttacttataatcaaacagatacgtgtaccaatttattccacgctttggtacgagccgtaccttagtaaggtacacgccgtaccattaggtgaaagtcgtcgtaccacctaatggtatgagccgtaccaccgggtggtaggcaccaaaagtccgggacttcagacacaaaaggctgtgcaatttctttcagatgaactgcacagccttttatattctgccagattgaagttcctgcggacttatttctttttcttccaaagtttggtcatatcttccagcgtcttgcctttcgtttcgggtacgagcttccacacgaagagggcggctgccacgcagataatcccataaagggcatatgcaaacatatggccgaacttatcgcccatctccccgagacgcatattgtacatcggcaggaaagtagacgaaacaataaagttgaaaatccattggaatgccaccgcaatggctaccgcagcgccacggatggtgttcgggaagatttcggcaatcagtacccagcagataggtccccaactgaacatgaacgaagcgctgtaaaccatgatgctgataacggatattattgccggcagtccggttacgacgttgcacatagccacaccgaaagctcctatcgccataccgacagagccggaaataagcagtggtttgcgtccccatttttcaaccgtgaacacagccagcaaggtaaagagaatattgacaacgcccatgagcacggtttgtaccatcggattggccatgcccatcgtctcgaatatgcgcggagcgaaataaagcacggcattgatgccgacagcctgctggaatacgctcagcatgataccgataaagataaccatccaaccgtaggtaaagagtctttctgtcttttcttcggtagttgccttgatttccgcaaggattacctttgcctgagaagagccgttgatacggctcaacacattcagcgccctttcgtccttaccgcacatggcaagataacgcggcgtttccggcaccagcaacaccaatagagcaaacagtccggcaggaacggcttcgctgacgaacatcagacgccaccccgtctccgtggtccatgcggcagcttcgggattcattatctgatttactccgttaacgaggtctatcaccggattggcatgactgcccagaataaggaagttgacaaagtaaactaccaactgaccgaagataatggcaaactgattccacgataccagtgttccgcgaatgttgctcggagcgatttcggcaatgtacatcggacaaatggcggaagccagccccacacctataccgcccaagacacggtagaaattgaaagccaccagaagagaataggaaggaacgccatgttcaaagaacaggaattcgggataataggaacccagcgccgacaagaagaacaggatacctgccaaaaagagagagtttttgcggcccaatccggaagcgaaaaagccggaaacggcgctacctatgatacagcctatcaatgcgctggatgatgtgatgccgtgtatcgcgtctgtgtattcaaaatcggctcccatgaagaaagcttgaagtcccttttctgcgccggagataactgccgtatcgtagccgaaaagcagaccgccaatgacagccacgagcacaatcgaaaagagatagagcttgctgcctttttctgtataattcatgataatagtggttaggagttagtgatgagcggttagtgatgaacgattagtgatgagtgattaatggtcagtaatttagtgataattgcttattccccatcttttatcactaaccaataatcgctaatcactcatcgctaaccactaaccgctatttatcagcaatacatatttacgattgcttcgtacaattcttgtttgccgctggtctgtttcggttcgccgttagcttttgcgtaggctacgacatcttccagtgtcagcttgccttcctcgaattccttacccttgccgctgtcgaaagaagcgtagcggtcggcaagcatcttcttgtaaggagactcttcgagcagtttggctgcgctttccaatgcacgtgccattacgtccatacctgcgatgtgagcaatgaagatgtcctcaaggtcggtagagttacggcgtgtcttggcgtcgaagtttgtaccgccgtcaccgaagccgccgttgcggataatttgcatcatggcttgtgtcagctcgtagttgtcgatagggaactggtctgtatcccagccgttctggtagtcaccgcggttggcatcgatagaacccagcataccgttgtctactgccacggcaagttcgtgttcgaaagtatggcctgccagtgtggcgtggttcacttcgatgttcactttgaaatctttatccaaaccgtgggccttcaggaagccgacaaccgtttccgtgtctgcgtcatattgatgcttggtcggttccatcggcttcggctcaatcaggaacgtacctttgaagccgcgtgcacgggcatagtcgcgtgcaatggtcagcatctgtgcaaggtgttccttttcgcgcttctggtcggtattcagcaaagacatatagccttcgcgtccaccccagaacacgtagttcgaaccgcccagttcgattgttgcgtcaatggcattcttgatttgaacggcagcgcgggccacaacgtcaaagtcgggattggtggcggcaccgttcatgtaacgtgcatgaccgaatacgttggcagtaccccacaacagtttgatacctgtttcctcctgcttttgcttggcgtatgcaacgatggctttcaggtttgcttcgtactcttcgattgtatcggcctcgtcgcaaaggtcaacatcgtggaagcagtaatattcgatgcccattttctgcatgaactcgaaaccagcatccattttgttcttggcagcctgcagtttatcggcatcaccgttccaggggaaatgtttcgttccgccgccgaactggtcaccaccctctgcacagagtgtatgccaccatgccatagagaacttcaaccaatctttcatcttcttgcccatgattactttttccgcatcgtagtagcggaatgccataggattcttactttctttgccttcgaatttgatttttcctattccgggaaaatactcttttgttgccataatgattaaatgtgttaatgcggtaatgcgccgatgtgctgacaacgggcacattacccgcgggttaattattactgttgttttattcttgtttactttcaatgtctgtttcaatcttcttcaagaggcatttcattcagtttctctgaaatttctttccggtctgttttcctttttattcgttgcatagacgctcctcataaaaagcagcaagccggtctcaaaaagaactttccgaagaatgcagaacaaaacttaagcaggccgtaagctctgcatcagatattgtttccagcgcgcataggcatcggcatatgcctgacggtcggcttgtccgggctcgatgatttcgagcttctcgagcgtagcaaaggcttcgttgttgtctttatagatgcccgcaccgatacctgcacctttggctgcacctaccgaaccgtcggtgtcgtacagttcgataacggcacccgttacgcctgccagcgtttcgcggaacagcggactgaggaacatattggctttgcccgcatggattttctgtacgggaatacccatctgctccataatgtcgataccatacttgaaagagaatacgataccttcctgtgccgcacggataatatgttgcttgccgtgctggttgaagttgattccttgaatggaacagcccgtttccctgttctccagcatacgttcggcaccgttgccaaaaggcaggatgctgataccggcgcttccgataggcgcctgggcggcaagaacattcatgtcactgtaagaaacgccttcgggagcaacggtgcgtttcacccacgagttgaggatacccgtaccgttgatgcacaaaagtacgccgagacgggtttgttccgccgtgtgattgacgtgcgcaaaggtattgacacgcgatttcgggtcgtagttcacctcaccgttcacaccgtaaaccacccccgaagtacccgctgtggatgctatttcaccggggttgaatacattcagcgacaatgcgttgttgggttggtcgccggcacggtatgtgacaggcgttccctctttcagacccaactcctgtgcggcagcggcgtttacacggccttgctcggagaatgtaggtctgatgtcggctatcagcgaggaatcgaaaccgtaatatttcatcaggaagtctgctacccggttgttcttgaaatcccagaacatgccttcggacagtccggagactgtagtgcagattgtaccgctcagtttcatggcaatataatcgcccggcagcataatcttgtatatcttttcatagacagccggttcattctcctttatccaggcaagtttggacgcggtgaagttacccggagagttgagcagatgcgagaggcataactcctcgcccagcgtttcaaatgctttttgtccgtaaggaacggctctggaatcgcaccagatgattgcaggacgcaataccttttggtctttgtccacgcacaccaatccgtgcatctggtaagagataccgatggctttgatgtctgccgcatccacacgcgcatccgccaatacggcttgcgttgccagcttcaggttttcccaccagttttcagggttctgttccgcccatcccggcttcacggctatgatttccgcttccgtcttcgggaagaatgcggaagatacgcacttaccgctttctgcatttaccaagctcgctttaacggacgagctgccgatgtcatatcctaataaatacatgtctttgagtttatattgttaaattttcgatttattccgtatcaggttttgaattcaggtgtcttgcctaccgccttaccttattatatatcttcttgtcgaaccggtaataccgtgccgcacgatgggcaactccttgctgcttctcttccaaaggaaccacatactccataagagctatctttttgtggaaattgcgcacatctatctgtttcccgtacaagagttcatacagcgtacggagctgggatgcggtgaacttacgcggaagcaggtcgaaaagagaggacgggttgaactcgatatactggcggatgtaggttatcgcctcttttatgataaggttgtggtcgaaagccagtgccttgatatccggcaaggcaacccaatttgccatatactcatccagaccgcggttgagcgtacggtctatctttacgagagaaagataagcgatggtcacgatacgctctactttggactgcatggcacgttccagccaatgcacgtctctggggtctttggtgcggttcttggagccgaacgccttgaactgcatcagatttacgttcttaagtcccgtcagttcattcagaacccgctgggcggcttcgtccaaatcttcgtccatatagatcaaactgccgggcaacttcatatcatggaaaacctcaccctcttcttctccggcacgtttaaccagcaagactttcaactgctctccgtcaaaaccaatcaccacacagtctaccgaaatatgattgtttgccaacggcgtattttgttccacgttttgcataatattttcgtttaagcgctgcaaatataatgaggtttttcaaatatgcaataagtaaaaaggatatttttataatgttataaagcattatttttcaaatatatacatatcgtatatgttacaatatcatcttattgtgttatcgtataaaatacaatatgtaatttaaatccgtcgcagcaaggggtaattgtagcagatacaataactatgaagtacctaattcttaaggatttctatatccgtacatttatcttgccagtgggggacatattgtattgcagatgtatgtgaaaaaggtacattgcacaaaaaacgcccttttgtgcggtgattatcagaaaaacctatacctttgcaccactttttattaaacactaaaaattaatgaagatgaaagcatttgtatttccgggtcaaggcgcccaattcgtaggaatgggtaaagacctgtacgaaaattcggctttggccaaagaactttttgaaaaagcaaatgatatcctcggatatcgtattacagatatcatgttcaacggtacagacgaagatttgcgccagaccaaagtaacacagcctgccgtattccttcactccgtaatctccgcactctgcatgggcgacgactttaagcccgaaatgaccgccggccactcactcggtgagttctccgcattggttgctgccggtgcgttaagctttgaagacggcttgaagctggtttatgcccgtgctatggctatgcagaaagcctgtgaagcacagccttctacaatggctgccattatcgctttgccggatgaaaaagtggaagaaatctgcgcacaggttagtgccgaaggtgaagtttgcgtagctgccaactacaactgtccgggacaaatcgttatttccggttctatcgaaggcatcaacaaagcttgcgaactgatgaaagctgccggagcgaaacgtgctttgcctttgaaagtaggcggcgcattccactctccgttgatgaaccctgccaaagttgaactggaagcggctatcaacgcaaccgagttccacactccgaagtgtcctgtatatcagaatgtggatgcccttcctcataccgacccagctgaaatcaagaaaaatcttgttgcacaactgacagcttccgtacgctggactcaaacagtcaagaatatggttgccgatggtgctaccgactttacggaatgcggtccgggtgcagtattgcaaggacttatcaagaaaatcgacagcaatgtatcggctcacggcattgcataaccgataaaagacagttaaacgcgaaggggggctatcccaaaaaacgatagtccctttttcattttttcaggatatacttatgtcgaaatcggaagaattcagaaaagctttggacgttcctatccgtaatctgtcggtagacgtgttggtacgggaaatttgtcatcagccggaatgcttcgaagctatgtatcggctgatgtcggacgaaaaacaaagtgttgcgtggcgggcgacatgggtatgcgagaaactgagcgaaatacatccagcctggtttatcccgctgtacgatgacctcgtctaccgtttatcggattgcaaacatcagggctccaaacgcctgttgctgtctatattatacaacctgccggtaaccgttcccgtttccgttgaactgcttaattattctctggaccatatgttatccctgcaggaaagcatcggcgtacaatccctttccatacgcatggcttaccggctttgtaaacacgaaccggagctgttaagtgaattaaagcttatattggagcatgccaataccgaattttattcgactggtgtcaaaactgccattcggaacatcctgaagaaaataaagaaataacagttctaccgcccttgataacaacttaataaataaaaaatccccttcttttcttttttatctcctattttcccttacctttgccaccgtaaagacaaaggggtgccccgacgggctgagattataccctcgaacctgatgcagttagtactgccgtaggaattggatatttttttcttcttagaacttaccttaacggtacttctttgtatttacttccattgttttatttaatagaaacagaaacatgaaagtatcaatcaacaacaaggaagtggaaaccgatgccgttaccctcttacaactcacaaccgagctttccttaccggcgcagggcgtggccgttgctgccaataaccgtatgattccacgtacggaatgggcggattatgctctgtccgaaggaatatccatcgtaataataaaagctgcctgcggcggataggctatggaaaaggttcagttcattacacattataccgaaaggtattcttacctcgactccgcccgcatggctttggaaggcggttgccgctggatacagctgcgcatgaaagatgcggcggaaaacgaaatactgcccgtagccgcggaagtgcgaaaactctgcaacgattatggcgccatattcatcatcgacgaccacgtggaactggtaaaagaaatccgggcggatggcgtgcatctcggcaagaacgacatgcctgttgccgaagcgcggcgcatactcggagaggaatatatcataggcggtacagccaacacgtacgaagacgtaaagaaacattggctcgacggagtaaattacatcggctgcggaccgttcagatataccaccaccaagcagaaactcagccctattctgggtttggaaggatataaagaaattatccgtcaaatgcgggcagataatatcaacctgcctatcgttgctatcggcgggattacttttgccgatattccgtctgtcatgcagacaggcgtcacgggcatcgccctttcgggcacggtgctgcgggcggataatccggtggaagagatgcaaagaattcttacggaaaccaatcaggcaggcaaaatcaaccaaacagccaattactgaaataacaaataaaaaaagatatggagaaattaatcattgcgggacgcgaattcaactcccgtctgtttttgggaacaggaaaattcaattccaatgaaatcatggaacagtccattctggcatccggtacggaaatggtaacggtagccatgaagcgtatagaactggataatgaagaagacgatatgctgaaacatatccgtcatccgcatatccagcttctgcccaatacttccggcgtgcgcactgccgaagaagccgtatttgccgcgcaaatggcacgcgaagcattcggaacgaactggctgaaactggaaatccaccccgacccgcgttaccttcttcccgactccaccgaaaccttgaaagctacggaagagctggtgaaactggggttcatagtccttccttattgccaggcagaccccacgctttgcaaacgtctggaagaagccggagccgctaccgtcatgccactgggtgcgcctatcggcacgaataaaggattacaaacccgtgacttccttcggattatcattgagcaggcaaacgttccggtggtggtagatgccggtatcggtgctcccagccatgccgccgaagcaatggaaatgggcgcttctgcctgcctggtcaacactgccattgccgtagcgggcaatcccgtaactatggccgaagccttcaagcaagccgtagaagccggacgcacggcctatgaagctggattgggactgcaagccgacaattttgtggcggaagccagttcgcctctcactgcatttctcgatgaatgacacacattatataatataagctatgaaatcaagaataaaatatccccgctcggagaaagtatatctgccgggaacaatctatccggaacttcgcgtaggtatgcgcaaagtagagcaagtgcccagtacaacctttgcaggcgaagaaaaagtcattactcccaatccggacatttacatttatgacaccagcggcccgttcagcgaccccgatatagaaatcgaccttaagaaagggctgccccgtctgcgcgaaccctggattctgcaccgcaacgatgtggagcaactgccggagattacctcggaatacggccgcatgcgccgtgacgacaagtcgctcgaccacctgcgctttgaacatatctcactaccctatcgtgccaaacagggcaaatgctgcacgcagatgtattacgccaagcagggcatcatcacccccgaaatggaatatgtggcaatccgcgagaacatgaactgtgccgaattggggatagaaacgcatatcactcccgaatttgtccgccgggaaatagcggaaggccgtgcccttcttcccgccaacatcaatcaccccgaagccgagcccatgattatcggccgtaacttcctggtaaaaatcaatacgaatatcggtaattccgccaccacttcaagcatcgacgaagaagtggaaaaggccctttggagctgtaaatggggcggtgacaccctgatggatttatctaccggagaaaatatccacgaaacccgcgaatggattatccgcaactgtccggttcccgtaggtacggttcccatttatcaggcattggagaaagtgaacggcaaagtggaagacctcacgtgggagctctaccgcgataccttgattgaacagtgcgaacaaggcgtggactacttcaccatacacgctggtatccgccgccacaacgtacacctggccgacaagcgtctgtgcggcatcgtgagccgcggcggaagcatcatgagcaaatggtgtctagtgcacgaccgcgaaagttttctgtacgaacatttcgacgacatctgcgatatattggcgcaatacgatgtagccgtttccttgggcgacggcctgcgtcccggctctacgtacgatgccaacgacgaagcgcagtttgccgaactcgataccatgggcgagcttgtgctccgcgcctgggcaaagaacgtgcaggcttttatcgaaggacccggacacgtgcccatgcacaagattaaggagaatatggaacgccagatagagaaatgccacaatgcgccgttctacacgctcggcccgttggttacggacattgcaccgggctacgaccatatcacttcggctatcggtgcggcgcaaatcggctggctgggcacggccatgctgtgctacgtcaccccaaaggagcaccttgcactacccgacaaagaagatgtacgcacaggtgtcatcacctataagatagccgcccatgccgccgaccttgccaaaggacaccccggtgcacaagtacgcgacaacgccctgagcaaggcacgctatgagttccgctggaaagaccagttcgacctgtcgctcgaccccgaacgggcacagacttatttccgggcaggacatcacatcgacggagaatactgcacgatgtgcgggcctaacttctgcgcaatgcggttgtcaagggaactgggaaagaaaaaggaataacttgtcaggctggaatacagagacaacagatttattttcacgtctttgtattctatccgtttcattagcgaattatttttatcatagaataaaatgttttcagacgaattagagaaaatatcctgggaagagacgacccggcgcatcaatgccaaaacagatgcggacgtgcgtcgtgccctatccaaagagcattgtgacgtagaggattttatggcactcatctcaccggctgccgtcccctatctggaaacaatggcacgtttaagcaagaagtacacggaagagcgtttcggaaaaacgatttccatgtttgtgccgttgtatattacgaactcctgtaccaactcgtgcgtgtactgcggtttccacatcagcaatcccatgccccgcaccatactgacggaagaggagattgtaaacgaatacaaggctatcaagaagctcgcgccttttgaaaacctgctgctggttacgggtgaaaatcctgccaaagccggtgttccgtacatcgcccgcgcgctcgatttggcaaaaccttatttcagcaacctgaagattgaggtaatgcccctgaaagccgaagagtatgccgaactgaaagagcatggcatgaacggcgttatctgttttcaggaaacctaccacaaggcaaactataacatttatcacccgcgcggcatgaagtccagattcgaatggcgtgtcaacggtttcgaccgcatggggcaggcaggcgtacattccatcggcatgggtgtgctgataggtctggagaaagaatggagaacggatatctgtatgatggcgtatcacctgcgttatcttcagaagcattactggaaaacgaaatacagcgtcaacttcccgcgtatgcgcccttcggaaaacggcggcttccaacccaatgtggtaatgagcgaccgcgaactggcacaagttacatttgccatgcggatattcgaccatgatgtggacatatcctactctacccgcgaaccggcttttatacgcgaccacatggccactctgggagtcactaccatgagcgcggaaagcaaaacggaaccgggcggatattacagctatccgcagactttggagcaattccacgtcagcgacgagcgtaaggccgtagaagtagacaaagccttaaagagtttaggacgcgaacccgtatggaaagactgggatgccagtttcgacctgaaacgggtttgaatccctttttcatagtttataattctcatcatgacccgatacagcagacaaatttcccttcccgaaatcggagaaggcggacaggaaaaactgcataaggcaagagttctgatagtaggcgcaggcggacttggctcccctgccgccctctatcttgcaggtgcaggagtaggtacaataggtttggcggacgatgatacggtcggtatcagcaacctgcaacgccagatattgtatacggagaacgaagtaggacagcttaaggtacactgtgccgcccaaagattgcgggctttgaacggtaatatagaagtgcatgcctacccttttcgtctcaaccgggagaatgcccgccgtctgattgccgattatgacatcgttgtagacggatgcgacaacttctccacccgttatctgattagcgacagttgcagcgcactgcacaaaccgtatgtgtacggcgccatccagggctttgaagggcaagtctccgtattctgttacggtgatcggcccaagacatacagggatttgtttcccgacgaaaccgcaacattgcagatgcccgctcccgacaattccgtcataggcgttactcctgccgtggtaggcagtgtggaagcaagcgaaacgctgaagctcatttgcggctacggcgaggttttggccggaaagttatggactgtcgatctaagaaccatgcaatcgttcgtccttttactgtaaaatacctcggaaaacatgaaactgataacaattacccagcctgcattctttgagggagaagccgaagcaatcacttccctgttcgatgcaggacttgagatactgcatctccggaaacccagcgcttcttatgaagacatggaacaattattgaaccggcttccgcctgaatatctgaaacgcatcgtcacacacgagcatttccaactggcgtctttccgaaatttgaaaggcattcatctgaacggacgcaacccgacagcaccggcaggcttcaccggacacatcagccgttcctgccattcgctggaagaagtcgccaaatacaaagcaacatgcgattacgtatttctcagtcccatatacgacagcatttccaaagaaggatattcctctgcctatactaccggcagcttgcaaaaggcgcggcaggcgggcattatagacgctaaagtaatggcattgggcggagttacggcagctcatttccctgaaatcagctcattgggcttcggcggtgcggtccttttgggagatatatggaaacggacgggaacggattttatcggacatttcaaggaattgctccgtgcggcgtctttattttaactatcaaatattttattatcatgtcgactattccggtcattctcaccattgccggctccgactgctccggcggtgcaggcatacaagcggatattaaaacgatttccgcgctcaaaggatatgctgcctctgtcattactgccgttacggcacaaaacacaatgggggttcaggcagtatgccctatcccaccggacattgtccgtgcacagataacatccgtcatggatgatttgcagcctgccgctatcaagataggaatggtgcacaatgccgctatcgtgcacaccgtagcggagtgtttgcaaaaattccggcctcgttttgtcgtttatgaccccgttatggtatccaccagcgggcgaaagctaatgacggaagataccgtgcgcaccattcaagcggagttgtttcctctctgttccctgataacccccaatttgggcgaagcgtccctgctcctttcaaatcccgttacggatatagaggagatgaaactggccgcctgtgaattagcaaaccgctatcactgcgccgtactggtaaagggcggtcacttatccggcaatacaatgtgcgatgtactgtacaacaacggccgtttcagcctgttcgaacagcaaaaaatagagagccgcaaccttcacggtacgggatgcacgctttcttccgccatcgctgcctttgccgcccgcggcaagggacttgaagaagctgtccgtcaagccaaagtttatataagcaaagcaatttgtcatggtaaagacctgcatataggacatggaaacggacctttgtgccatttcttttccggggaaattaattttgttcccttaaattccaccgaagaagttatcagaaaattcccccacaaacaacaagcggaatatagagaggaaaactttcaaggagaaacttcataattaaagcccgaaatacttgacaaggggtatcttgatttcgtatatttgcatatcggacaattgataacattaacctaaaacttagcaaatggcaaaatctacttcttccttttctgaattggcgcaaatgtatttccccggttgcgctactcccaaaaatgcagtgcgatgtctgcaacgcagcatcaaaagatgtacaaaattggcaacattgttggcagaaaccggctatcttccttacaatcaccgctggctttcgcccaagcagcaaatgcttatattcgagaatttgggtgacccataccctgattaagttcctaaaacgacataaaaaaacggcatttcacacagtgatttgccgttttttttgtacttatatttccataatttcatttatagtcttaaaacgcctattaataaattatgaaacaatttattaataaattttcaaaaattgtagtaaaattcaaaatacattcgtttataggggtgtattgactgtataatcgttttacttttctgcatagcaatgctttgtttgaattctttatctacatgggattgtgcccaaataatgaatgcaccataaattcaatttaagaaataatatgataaaattgatagctaaatcttctattgccggaaagtaatgcttttccacatcataggactggcattggccgccaaagtccatctgttattgccggaaacttttgggacggcagtaccgtcctcttgcttgtcggtattcagcacaaggtcgcacctggcaggagcgaatacgttctctccggaatgagtatctctgttgtgaaaaacggcggtgtgctctatactgctgcgaccatcacttatgtcaacgaaatttccggctacggtagcttctatccgggtgaggctgcggcagcccgttacgatataattgccgaactcggtacacttcggtattttgagcgtttcgaggcccgtgcattcgtagaaagcctcctggcctatcgcagtcacattatccaaagcgagcgtctccaatgaagtgcatccccagaatgcgcttagattaatccgggtaacctgcgaaagattcaccgtaatcagcgcagagcaacctgaaaaaacactacttccgattgtcttcatatcatcgggcagcatcacctcctgcaaggcggtgcaattcgcaaaggcggcattgggcagagttggcgtgccccagtccgtcactccggtgaggtcgcatttcgtaatttgtttattattgataaatgtaccccaactaccgcccattcctatcttggaaagttcgcccgtcagtttgagttcggtgaagcctgcggcgagggcggcacggatagttagctgcgcttcgtcggcagtcatggaggtcatgtcgatattaccggaagcgggtggtgtgaaatttttcaggcgcaacttgatttgataattcgtcgtcgggtcgagataaagttcaaagatgtcatcattatactgcttcatcgtttctccatagagactgacccatgacgactcaggattcactgtcaaacggtcgtagtccgcctgcgtcagttgataaccgtcggcaccctgggcgatagcggatataccgttcaacgtgaaacagaggtgcacatcacccgtaagggctttcggaacggagataaggggataagaaacagccggaaagatatcgttggagagacgtatgtaagtcccggcagcagtctttccgccgttcagcacaaggatagcgccattcatgaccgttgtactgtacgaactgcctgtcgcgtcagacaattcgcagccgtcacccagttccaatgccgctttttcgccgacagccgcaatcatatgctgcccgttcaatgctacgcctttacccaacgtaatcctaccgttacagacatatatcatggacaaaaatgagttcgcgccttgagccagttggatattggtgagttcaatatgaacggcatcatcgtcggcattgatattgccgaggaaatagtagctttcattttctcggacgagggtgtgaccgccgccgtctatcttaaagtagccgctaccgtttatgggtggattggtgcggtcaccacctgccggtatcgtaatgtcactacccagcataatgagtgtcgggacatcggccgaggcaccgcccatccgtagtgcttcgagcagagcttcgtaggtggtgacggtgaaaccttccggcacggcatccgctaccgtcacttcgcaggttacctgttttccacccacagttgcggtaatagtggcatttccggcagagacagccgttacaagcccttccacatcgactaatgcaacggacgtgttgttgctgctccatacaagaccgtcatatccggcatgctccggcagtacggtagctgtaagtttttccgtatcaccgacggtcattgtcaatgccgtccgggacagcgtaacttccgatacagccaccggagcattgtctttgtcgcatcctgccaacagcattgccaccgacaggaacagaatcattttttttactttcataggttctttacagtataaattattgatatcccgttatctaacgatgctgtaaatttacattatagcaactgtgaggacaagagtgcgtgtggtctatttgatactacggcacaaaatagaccggtctgtttcatttttacacgaaacagactgcctgctttactactcaaaaaaacgtttggtgtttttacaacgtgtgcttattcactttacaaagtcagcattgtgacacaatccgccgctgatactcgaccggggtttcacccgtgagctttttaaaatatccgtaaaagttgcttttagtggcaaaccctaccttgcgtgcaaggtcgttcatggagatgccgagttcttcggccagcaattgtttggcatattcgatacgtaagccgacacgccacggacggaagtcccgccctatctcattcttgaaataccagcaaagaaactcttttgtcgtccccaattcccgcgcaatttgttccctgccttcttctggacgggtaaaacgccgttcggcaacccaacgttcgagtgcaagccgcagatgctctttctccgttgccagttccggttcggacaatccacaggcagccatatctaccgcttgcagacgaaccggttcctgtccctgcgttacggccggcagataataattgatttttaccacataattacaaaaacgaccggcaaaccacccgtaaaacaaaatgtaaccgacagtaaaaatattataagcaaccggtggcagccacacggacaaagaagcggctataccaaccgagagcgcagcataaaagccgaatttcgtccaacgcagccgtgcatgctggtcttcatcgtaatattcttccaacaatcgaaggcactcggcatactttcggcgaaataacaatgtataacagactaactgcactgcatatacagccaatgcaacaaaaaacacccagcattcctcacttgtcaaagccataagcagaaacaaggcaactgcaaccgttacgattcctgcttgtatccgtactctgtggcaggtaacatacaacggttgaataaatgtcagcagtgtgacggtaaacagtaacgattggtaagcggccaccgctatcgtaaagactgcaatgattttacggtcggcctctccaccattaaacagttcgcaaaaagcaggaatagcaagaatgaaataagatgcggcaagaatggcacgtgccgtccgcagtcggtgcgtatcttccctatgaggaatatgaatgctgcataactgccatccccaaacagccaaagcaatgcctgacgcaagggttaggaacatataaaaatccaaccacatattattatttccgtcctattaaaacgaggacattacaaatgtaaccattttaggcatttgtgccaaatataaactctattaccgacatataaatctgtaatagagtttattttatccgtaattcatctaccggaagctacctcttaccttcctacctttgtatccgaaaagaatgtctaatccaatcaaactgtattaaaaatgaaaaatcagactaaaacacaaaatatgataaatggacaatcagaaccgatgaagctcgtattcaactataataatgtattttacagtttctattacaatgactttagcggttgtgtacaccgttcacgcgaatatgccattaactatgtctattcgggtgagatgattcttgataatggaaaagagcagattcatgtcggaaagggcgaatgcatcttcataccgcgtgaccaccacattaccatgtataaaaaaacaaaagacggtgaacggtattgcggtatcttccttatgtttacacgccgtttcctgcgcgaaatgtacggtaagctggaacaacacagaatgccaactaacactccaaagctcgattccggtgtgataaaactacccaagactgtggaactcgccagcctttttacttctatgacgccttatttcaatccggaagtaaaacctgcagatgacctgatgcaactgaaattacaggaaggtttgcttgcattgttgcatgttgacaatcggttcgcaccgatgctcttcgatttcaacgagccgtggaaaattgacatcatggagtttatgaacgaaaactatatgtgcgagttcacaatggaagaaatggcacattacacagggcgcagccttgccacgttcaaacgggatttcaagaagattagcgatctgacacctgaaaaatggctcatccgtaaacgacttgaagtagcttacgttaaaatgcaggggggcaacagaaagattgtggatgtttatgccgaagttggattcaagaatccgtcacacttctcgaccgcatttaaaaaacaatatggcatatcgcctaccgccgcattcgtttaattcgaatactggaaagtattgaacttttgagaaatcttatttgagcctcacagtaaggtcgctatggagttttctccttaacttcgcttccgaaatcagaaacataaaacgaaacagttatgataaagtggttaatatctttaatgatggcgtgcagtcagactttaacattaagtgcttgcaatccggatgattctccgaaaaagacggagaatatagtccccgaactcaaacctgaatcaaatcccgttccatccccagaacctacatccgataacggaatgtttgacttgtccgaaggtgaaaacggcaaccctccgactcttctgctcagcagtggatatgaaatgccgattatcggtttaggcacatacagtcttcatgacgatgtgtgcatgaatgccattctggctgccgtcaaactcggttatcggaaattcgacacggcaagttattatggtaatgaagaagaggtcggcaaagccattcgaacttgcggcgtgctgcgggaagaactgtttgtctgcacgaaactctatccgaatcagtttgccgatgcagaaaaagccattgaggaatcactgtgtaaactcaatataggttacgtggacttgatgttgcttcatcatcccggagcgcacgatgtagaggcttacaaggcaatggaaagagcagtcaaaaacggaaaaatccgttcgattggcgtatcgaactattacatcaaggaaatgacggattttctgcccaaagtgaatataaagccaacactggttcagaacgagatccatccttattatcaggaaaaggaagtggtaaaattcatgcacgagaacggtattgccatcaaagggtggtatccgctcggaggcagaggttatacggctgccatgcttggtaacggaacaatcggacagattgcaaaagcgcatggaaaatctcctgcacaaataattttgagatgggatttacaaaatggtatagtcatcattcccggttcaagtaatcccgaccatcagagagagaacatatccctattcgatttcgagttgtcatccgaggaaatggcacaaatcgccgctcttgaccgaaacgaaaaacatgattggtattaaaacaacaattaatgaggattgcacgtcgatttttgagagagtatacaaataaagaatagaataatatagaaacagaacaatgaaaaaagtattagtcatatcatcgagtctccgcttgcggagcaattcggaatccttagccgatgcgtttgccagaggagcttccgaagcagggaatgaggttgaaaaaataacaatcagagaaaaaaaacatccgtttctgcaaaggatgtctcgcctgtcagaaaacacagcactgcgttatcaacgatgatgcccccgcaatcgtggccaaaatgcacgatgccgatgtaatcgtattcgctacgcccatctattattatgagatgtgtggtcagctcaaaactttgcttgatcgtgccaatccgctctattcgtccgattatcatttccgcgacatttatatgctgaccagtgcggcagaagatgaggaatatgtaccggaacgtgccgttgcgggacttaccggatggattgactgcttcgaaaaagcccgtcttacaggaacagatttcgccggaggtgtcagtgcaccgggtgaaacggaagggcatccttcgttagtgcgtgcatacgaaatggggaaagccattaaaggataattgcttcaggtttgcaacggtaccttcttataaccgccgcacgttatccgctcatctgattatttgctccaatgttcatcggtcattggagcaatttttttagcatttacattgagcttttgagaaaatatataattgagcttttgaataatcctctttgagcctcacaacaatgtccgattggtcttatccccgtatctttgcattagaaaataagacaataatcatttaagtaacagagaaatgaaaacagcgaatcttaaatcggtaactatcgcagccttgttgggtataggactgcttaccggttgcacgaacagtacaacaaatcaaaaaccaagtgataatatggaaacattgaatctgacacaagaatgggacaaaatattcccgcagagtaacaaagtaaatcatcgtaaagtaaccttccgcaatcgttacggcatcacgcttgccgccgacctctacgaaccaaagaacgctgaaggaaaactcgccgccattgccgtgagcggtccgttcggcgcagtaaaagaacaggcttcgggactttatgcacagacaatagccgaacgtggattccttaccctcgcattcgacccctcttatacgggcgaaagcggcggagaaccgcggaacactgcatcacccgacatcaacacggaagatttcagcgcggcagttgattttctggcagcactgcctaacgtagatgcggaacgcatcggtatcatcggcatctgcggatttggtggcatgggactgaatgccgctgcaatggacacgcgcatcaaggcaacggttgcttccacgatgtacgacatgagccgcgtgaatgccaacggctatttcgatgccgaagacagctccgaagctcgtaaggcgaagcgtgaagcgataaataccgtccgtacccacgatgcgcagaacggtacggtcacttccggaacacccggtctgcccgctgaaatcaagggcgatgaaccgcagttcgtcaaagactacttcgattattacaagaccgatcgcggtttccacgctcgctccatcaactccaacggggcatggagtcccacaatggctctctcgttcatcaatatgccattgttgtcctacatcaacgagatagacaatgccgtattgctcattcacggcgagaatgcccattcacgctatttcagcgaggatgctttcaaacacctcaagggtgacaacaaggaactgctgattattcccggagccaaccatacagacctctatgaccggatgattccgttcgacaagctggaagcatttttcaaatccaatctcaaataatgaactgttatgagaacaaaacttttatgcctgcttttatccgtcattggattatgtagttgcaactctacaagcgcacaaaagcaaccccaaacaagtaatgccacgcccagaaaatcgttagtcgtatttttttcatggggaggtaatacacgcgccgtcgcagaaaaaataagctatctaacgggggcggaaggattcgaactgaaactcgctgttccctatactactgaccgtgatgaaatagaagaaattgcaaaacgggaagttcgagacaagtataaacctgaactcgcatcgcttcctcaaaacatagaacaatacgatgtgatttatatcggttctccgtgctggttcaacaccctcgcaccgcctgtgcgtaccttcctttccacggtagatttatccggaaagaaaatagtaccgtttatgacacatggaggtagcagaatggggcaaagtgtacaaacaatacgccgtttagctacgaaagctaatgtaacagaaggtcttgctatccgtgaatccaatgcgagcaatgctgataatgaaatattggcatggctgaaaaaacacaatttaatcaaataacaatatggataaaaaatattgattgcctatttctcctcagataatatcttttcttccatccgcatcaacgtagtctgtccgggagtcatcgacacggagatgatacgccgtttctccggtgaaacaccggaaggttacaaggctatggcggcacaggaacctatcggcaggttgggtaaggtggaagaaatggtatcctccatgctgtggttgtgttcggaaggagccggatttatggtcggccatgcgcttgtagtggatggtgggcagacggtaggtatttccaatgacaacattgagcaataaaccatttgaacaaaaaagttctaatcagatgtttatgcaacgtaaactccaaaaattcttctcatttctcgactatattaaaagaacaatacattttatcttctactgccgttttaccctaattttatatcattgcgtaacaatgggaaacaaccataagacttttcagctacaatagcaatttattattggaaaaacatttctaaagggtttaaaaggggactgcggcagcggacgcccgttgtatctttgcatagtcattaaaaataaatggcattagtaaaccttatttttttaaccttttaaactttaacaattatggctttaaagtatgtagtaaccaaaagagtattcggctttgacaagacgaacacagaaaagtatgtagcgaaatctgtcggttcaggtaaaatgaacttcgacaaaatgtgtgaaaaggtcagtcgtttgtgcggcattcaccgcaaagtggtggatttggtggtaagcggtttggtagatatgatggcggaagatatcgacgacggcaagaccatacaaatgggtgagttcggattgttccggcctacaattaaaaccaaaagtgcggatacggaagatgccgttaaggcaagcaatatcctttcaaaacgtatcgtgtttacaccgggaaagatattcaaccgcatgctgaatgaaatgagtgttacccgttccgtacctgtagacaccgattatacggacggcagcagcagtagcgggaacaatggcagtggcggttccggcaacggcggcgaagaagaaaacccgttaggctgattgtcatagcgacagcaaattgccttttcttgaaaacaaagttgaagcagcggtatccactccgctgctttttttgttgcatatacctgccattatttaatattatctattatttttgcagaaacaatcataacacacagctatctatcatggaaaaagccaaagtatatttttcagacctacgtacctctcccacctctaatcttttagataagatggaacgtctgcttaaacgtgcaggcatcggacagcttcctttaaaagacagttttaccgctatcaagatacatttcggcgaaccgggcaatctggcgtatatccgccctaattatgccgcccgcatggcaaatctgcttcgcagtttcggagccaagccttttctgacggattgcaatacgttgtattccggacgtcgctccaatgcggtagaccatttgcagagcgccatggagaacggcttcaatcctatatccgctcaatgccaggtgcttattgccgacggactaaaagggacggactacagagaaataccgatagacggagaatactgccctgctcccaagattaggtactgccattgccgatgcggacataatcatcagcatgaaccattttaaaggccatgaacaggccggatttggcggcgctctgaaaaatctcgggatgggatgcgccagcgtaggcggtaagctggaactgcatgcctcctcacagcccaaagttgccactgaaaattgtatcggatgcaatatctgcgtaaaacactgcgcccacgatgccattcatctgaatgccgaacgcaaagcggaaatagactataccaaatgtgtgggatgcggacaatgcgtagctttgtgccagcatgacgccgccgtagtgagcgactgggatacgtccgaacggctgaactacaagattgctgaatattccgttgccgtgctgaaagacaaaccgcacttccatatcagtttcattatgaacgtatcgccggagtgcgactgctggaaccataatgatgccgccatcattcccgacctcggcatgctggcatcggcagaccccgtagcgctggataaggcgtgtgcagacctggtgattcaggctcccgtactgcacagtgataatgtgcttgccaaaaagcacgaacacgaagacttgtgcggctgcgacaaattccacatgatacatcctgatacggactggcttgccggattgcgtcacgccgaaaaaataggcttgggaacaatggattacgagttgataaaaatataaactgcattacttttatggcaaaaacaatggaagaagtgctggaacgcttccgtacaattgagtttcacgatgattttgatatgattgtagccattgccaatggcggcatcgttccggcaggcatcatcaatcagcgtttacaaaaagaagtgcatctgctgcgcatcaatttgagggacgaatatcagcatcctaagtacgatgctccgcaactgctggctcctgtcgattttaacttcaggggaaaaagcatcctgctggtggacgaccgtataaaaacaggagctaccataaagttggcacgcgaactgctgaaagaggcacgcagcatcaaaacctttgcagtaaacggtacggccgattatgcgctgtttgatgaaacgtgtttcaaatttccgtggatattataataaatgaacatttttctgctattttcctttcttactacgataaaataactaatttcgtaccgaacaaaaaatagtagatttcaacaacatggaaggagcaacgaacaattggttctctaataaatactctatcggttatgccttgagcggcggtttcattaaaggttttgcccatttaggagccatgcaggccttattggagcacgatatcaagcccaatatcatttccggtgtcagcgcaggtgcactggcaggtgttttctatgcggacggcaatgaacctcataaagttctggattattttgccggacataaattccaggatttaacgaaactggtaattcctaaagtgggcttgtttgaacttagcgaattcaaagacttcctgaaaagcaacctgaaagcgaagaaactggaagaattgcagctaccgctgattatcaccgccacggatttggaccacgggcgccttgcacattttcataaaggagatattgcagaacgcgtagccgcatcctgctgtatgcccgtactgttcgcacccgtaaaaatagacgagacgtactacgtagacggcggactgctgatgaacctgcccgtatctaccatccggcgggtatgcgagaaagttgtggcaatcaatgtcagcccattaatggcgcctaagtacaaaatgaatattgtaagcgtcgccttacgttcgtacaacttcatgttccgttccaattcatttcccgaacgggaaaaagccgacctgttgatagagccttacaacctggacggttacagcaacagggaactggaaaaggcagaggagatatttatgcaaggatataatgccactaatgatatactggaacgcctgcaaatagaaaaaggcactatatggaaagaataaaaataaccattctctaaatagaaagaaatgagcgacgaaaaactgattatttatcaagtgtttacccgattattcggaaataacaataaccactgcatcaataacggcagtattaccgaaaacggatgtggcaagatggcggattttaccgccaaggcattaggagaaatcaaaaagctgggagctacccacatttggtataccggcattattgaacatgcaacgcaaacggattatcgtcgctacaacatccgccccgatcatccggctatcgtaaaaggcaaagccggttcgccatacgcaataaaagactattatgatgtagaccccgatttggcgaaagacgttcccgaacgcatgagagaatttgaaaatctggtgcaacgcactcatcgcagcgggttgaaggttatcatcgacttcgttcccaaccacgtagcgcgtcagtatcattcggatatgcagccggacgggacttctcaactgggagcaaatgacgatacggactatgcgttcagcccttataacaacttctattatattccgcaatcggaactgcatggacaatttgatatgaaaggcgctgctgccgaaccttataaagagttcccggccaaagcaaccggaaataaccgctttgacgcatatcccaacatcaacgactggtatgagacggtcaaactgaattatggcgtggattatcagaatggcggtacctgccatttcaaccccattcccgatacatggaataaaatgctggacattctgatgttttgggcagagaagcatatcgacggtttccgttgcgatatggcggaaatggttcctgtcgagttttgggaatgggctattccgcaagtgaaagccaaataccctgccctactctttattgccgaagtgtataatccgaaagaatacggtaattatctgtttcgtggaaaatttgattatctctatgataaagtgggattgtatgacacacttcgtgcaatagtttgcggcaacgaatccgccaccgccattacacgggcatggcaaagcctgggcgggatagaaaagcgaatgctgaattttctggaaaaccacgatgaacagcgtatcgcttccgatttctttgcaagcaatccgcgtaaagccattcccgccctcatcgtatcggcttgtatgaatgtgaatcccatgatgatttatttcggacaggagttcggcgagctggggatggacagtgaaggattcagcggcagagacggacgtaccactatctttgactattggagcgtggacaccatacgccgctggcgcaacggcggaaaatttgacgggaagatgctgacggacaatcagaagcatttgtatggcatctatcaacgtatattaacattgtgcaatgaagaaaaagcaatttcgcaaggagatttctttgacctgatgtatgccaacatcaatggctggcgcttcaacgaacataaacaatatacattcttgcgcaagtacggacgggatttattgctgtttgtcgtgaacttcgaccatatatcggcagaccttgcaatcaatattccttcccacgctttcgattttctgcaaataccgcaaatggaacaataccgagccgtagatttattgaccggtaaagaagaaaatataagcttattgccttataaggcgacagaaatatctgtagaaggatacagtggcaagattctcaaaataaagctatgaaaaagataatgcagggtgacccaatcactctgcattatctttaccttccattttatcttttaatctatataaacgggtaatagccggattatagaattcgtcagggtaatgggcagctatatcgctcaaattagcccgtacatacctttttacatcaaatatattttcagcatcgcttaacatgacctgttcaggaaatgttgccgtttcagcccacttaaccagtgcattaacactttcttcatcgtatttatactcttccatcttttatttatttttccgacaaagatataacaaatactaaagttatccttacccttatgaacaaaatctgaaagtgtaacgttatatagatgtgtttttcatagtattagatataagattaattaaaggagacgtacctgcttgtgataagtaagtacatcaaaaaacagaagcgtctgtttgattgataaatgtgtaaggagcatcggtttacccaagccgatgctttttttatgcctatttgtagcatgttagaaatattatccgtaaatttggcagaaataaggatatatacgatatgaacatccctgttatatttcaatttctgaaagaactatccgccaacaacaatcgtgaatggttcaacgcccatcgggagcagtatgaaaatgcccggaacgagtttgagaacttgctgacagtaattatctcccgtatctcattgtttgacgaaagcattcgcggcattgaagccagagactgtacataccgtatctaccgagacacacggttttccgaagataaaacgccttataaaaatcattttggcggctatatcaatgccaaaggaaagaaatcagaccattgcggatactatgttcatttacaaccgggcaactgccttttggcaggtggcagttattgcccgccctctcccctgctgaaagccttgaggcaagcggtttatgataacatggatgagtttcgaggaattgtcgaagacccggcttttaaacaatattttcccgttgtcggcgagaatttcctaaaaacagctccaaaaggtttctctaaagactatccgtatttgaaatatctgcaatgtaaagaatatacagtttcctgtcatcagcctgacagtttctttttagctcctgattttctggaacgtacagatgatattttcaggcaactgaaacgtttttccgactttgtaaattacacgatagacgactttgaataaatttaaaaactaatttaaaaacaattgaattatggtagtagacagacttgaaaacatagagaaatatgcttcgctgaatcctttattcgcacaggctattgagtttttgaaatcacacgatttaaacgctttggaagtgggaaaaaccgaacttaaaggtaaggatttgcttgtaaacgtagcgcaaaccaaacctaaaacaaaggaagaagccaaactggaaacgcataaagactttattgatatccaaatacctctgtcgggtactgaaataatgggttataccgcagcaaaagattgtgtgccggaagatgctccttataacgcggaaaaggatattactttctttaccggtctggcagaaagctatatcgaagtaaaaccgggtatgtttgccattttcttcccacaagacggacatgctcccggaatcactccggacggcgtgaaaaaagttattgtgaaagttaaagcataatacaaatacccaaaaacaatcctctatggaaacactgaatttgattaagaacgatccttggctggaaccatatgcagatgccataaacggccgccataaacatgcctctgaaaaagaggcagagttaaccaataaagggaaacagacattgtcggattttgcatccggctacctttattttggtttgcaccgtactgataacggctgggttttccgcgaatgggctcccaatgccacccagattttcctgattggtacattcaacgattggaaagaagagaaaaaatacagtctgaaacgaaaagcaaacggtaattgggaaataaagctcccagctgatgccatgaaacacggtgacttgtataagttaatggtacattgggacggcggttgcggcgaacgtatcccggcatggaccaaccgggttgtccaagatgagcaaaccaaaatattcagtgcgcaggtatggtctccggagaaaccgtacaagatgaagaaaaaaactttcaaagctgctacagacccgctgctgatttatgaatgccatatcggtatggcacaagaggaggaaaaagtaggcagttacagagagtttcaggaaaagattcttccgcgcatagccaaagacggatataattgtattcagattatggcaatccaggaacatccgtattatggaagtttcggctatcatgtttccagtttctttgcggcttcttcccgtttcggtactccggaagagctgaaggaattaattgacactgcccacagcatgggtattgccgttatcatggatattgttcattctcatgcagtgaagaacgaggttgaaggcttgggtaactttgccggtgatccgaatcaatatttctatccgggtgcccgtcgtgaacacccggcatgggattcgctctgctttgattatggaaagaatgaagtaatccatttcttactatccaactgcaagtattggatggaagaatatcacttcgacggtttccgttttgacggcgtgacttctatgttgtattacagtcacggcttaggcgaagcattctgtaattatggggattacttcaacggtcaccaagatgataatgcgatctgttatctgacacttgccaaccgcttgattcatcaagttaatcccaaagcaatcaccattgcggaagaagtatcggggatgcccggtctggcagccaaatttgaagatggcggctatggctttgattatcgcatggctatgaatattcccgattattggattaagactatcaaggaaaagatagatgaagattggaaaccatccagcatgttctgggaagtaaccaatcgtcgccaggacgaaaaaacaatatcttatgcagaaagtcatgaccaggcgttggtaggtgacaaaaccattgttttccgtttgatagatgccgatatgtattggcatatgcaaaaaggcgatgaaaattatacggtacatcgcggtattgctttgcataaaatgatacgtttactcactgcatcgactatcaatggcggttatcttaatttcatgggtaatgaattcggtcatcccgaatggatagacttcccccgtgaaggcaatggctggtcgtgcaaatatgcccgtcgtcaatggaatctggtagataacaagaatctggcatatcattatctgggcgattttgattgcgccatgttggaagttattaaaagcgtaaaaaacttccaaactacaccaattcaggaaatctggcataatgacggtgatcagatattggcgtatatgcgtaaggatttgatatttgtattcaacttcaaccccaaacagtctttcactgactatggatttttagttcctgccggtaagtacgaagtcattttaaatacagataatcctgattatggcggccacggactgactgatgatacagtgaagcattttactctttcagaccctttatataaaaaagagaaaaaagagtggcttaaactttacattccggcacgtacggcaatggtattgaagagaggcaaataaaattaaaacagaaaatataaccatgagaactaaaaaaagaggcagatcctaaatggtctgcctcttttctgtattatatatgaattttataattgagtatttataaaattcaacattgtattggcattgtctatcatctttttctgagccggtttactcggagaaagcagaggaataagtttttccaaatattcttttgcttctttaaattctacttttgccttttcagcgtcagttttcaacgtagtagcaccctgactgtaaagtaatgtacctaaactattgagagcattaacattattcggctgaatctcaagagcttgtttaaaagcatcttctgctgcactatttttcttagctctctgtgctaaaataccttgattcacataatatgtggcatacaacttagttaatgtcttattaccgggtacagcctccagaccttctttcaaagtggcaacatattcatcatttttcttcaaatctttcaatgcacctgccttgcctatataagcatttgccaagttatactttttctgtacagctatatcaaaatatttcaaagcttcagccggtttcttaattttatcagcgcaaacgccacagttaaaagcaattaccgaatcttgattgttggtttgtgtcagataggtgctgaattttgtaaatgcaacctgataatttttagattcaagtgcagctttaccttcgttaaccaattgtgccggatcagcattctgcgcaaagaaattagtagctgcacaacaaagtgcaagagataagattaattttttcatatgcttttattattttaatattgatatttcaaagttagttgcctaaagcgtagaagcaaaacctttttaccttttttgagttttttacgagagtagtaacaagtgttattttacgtaaacaaagagggataaaattttgggctgacccattatgaggacaaaatgcggacatttttaaaaataagaaaaccgcaaatgcttattttttagctatttgcggtttttctttgtgattccgttgcgattcgaacgcaagacccacgccttagaagggcgttgctctatccagctgagctacggaaccatccttaattgcggtgcaaaggtacgtttttttatgaaaactacaaattttacacccaaaatatttattatttatattaaaataatagatctatatatgaaaagtaaatagttgttctattgaaatacaatgctttagatgtaccttgcaaatttacacacctcatttttatgtaatttaatatatcccacttttacaactttgctagtttatattaattaactctttttatatagcaatgccctatgtctgattgctaaaaattgttttcctattctccaaacgataactctttcctgagagattgattacttcacaacagtagagcaacctgtcaagtaaggcagcagccaccgcttcatctcccagttcctccaaccactccgccagtcccctgttcgcaataataatgagtgacactttttcctgaagggtgttaaccagcttgaacaatagcagcatatcttctctcttcaaaggatataatgtgacattatcaattgccagcaaccgggctttcattatccttttataggtcttcatagcatgtcgggaaacatcctttgtcttcagacagacgagcagatcttccaggcttatcaaggcagcattgtatccttctttcaccgcctcatgaacgagcccggatgcaatgaatgtctttccggttccgggacctcctaccaggaggagattgtatgccctgctcatccacgtgagctcacgcaactcccgaagttgtctgccgtccagtccttctgtccggttgaaatcatactcatccaaagtatgcctggcagggagtccggccacttttattcgtgaaagaaagcttttccggtccctttcacctacttcttttgcaaggcaggaaaacagaaactccgaataggtaggctgcttttcttgtgcctcatgtataatctctgtcatgtgttcagccagacttgccagtttcagacgtcgtgcatattcgaccagttcttttttacgttttatcatgattcgtgaaaatatctttgtaagactgcatcattccggtttgaaacggtggatgcatgctcggtggttgtgaaatataagtgctgccattttccggtatctctccggagtttctacgcacacactcgcatagattcctaaccgactccccattatagatgccccggtccagacacatgcgtatggcttcgaccagcgtatgtccgtcatagctcggaatactacgcaggattacttccaggttactcctgtagtagcgttcctttcgccggcgcagattttccagccataaggcgacttccttgttataagatacatatataaggatgcgttccgccaatttctgtgtaccggcatttctggccctccgatgtttttcatcatatatgatcttccctcttcccatgttaagaggatgcctgcccagaagttttcccgtatctttactgtacagttccagacagccttcagcttcttgtagccatactgttgtttctccactccggtaggttcctgaaggaacactgtagtagtttccccgatactgtaccgtattgtctttacgtacatggtattcggtcatgtactcctgcggcggttgcggagttccataataaggcatcatgaaatttttctccacgataaactcccggttgggaatcagacgggtggttccatgttcctttccattcccggtcctttccaaccaaaggcgtgcttcttcattaagcctgtctatgttataaaaaagtctccctgagagaaagttgccttttacatacttgactacattctccacctttcctttcgattccgggtccgcttttcgacagaatacaggcaggaaatgctgctcctttacgaatgattggaattttgttgtcagcaccagatctcccaaattctctcttgatataagtaccctgtcctggtcatagattattttgcggggctttccgccgaaatactggaaagcaagttcatgtgcgtatactgcaagttccgtatcaaaaggccggcgactgaaatggatgaacttttgccgggaacgtgaaaggactattgcaaagaagtaaactttcacgttacttccgtttccaacaggtatccatttctcaccaaagtcagcctgcgcatattccccgtaaggtgtatccggctgtttctcataatcccgacgaaccctgccgtccgagttcttcccgataccgtatttttcccttatgcgtccgacaaagttaaatacggtcttgccgcatacttgagggaagtccggataacattccctgagccagtcatgtatcctggcagcagatatatacggatattcttccagggttccgcgcacatattcctcatattttccaagtttcaacttatgtctgcgatgagagttctgtttcctgatgaattcttccctgcttatcgccaggtatcgccgtacggtgcttctgtctacgcccaggcatctgccgatctgtgtcttgttgagtcctttggaacatagttcccttaccttgtaccacatatactgtttatcttttaaaaagcggctcgtagtttccattatgatgtctttctctttttgagccggcaaagataagacattccattatcaggatgaagatgattcaaccccgtaagtgttacatcatcttttccattttttcaagggtgaaattactgctttcaggggaaagcggaaccgattccaaataataagattacggcacttcctgttttgttctaccattccggtagaacaaaacaggaagtttcattactaataaaaaagcaaagaggttgctggaagtcctgattgaaagtttttttattcaacgtattatatagtccatatatttcccaatccaaataatgggaaacatcctctctttacgcttaaagagaggatgataacaaacaaaacaaacaactttgcatcttcacagacacaaaatagtcagagtataaatgttcaaaagaacatttatcaaatacaaaagtattatatattattattctatgcataaaaataattcacaaaaatcctttaaataatatctaaaaacatgtatgccatacagtttgtgccaacaagatacaatgccaatataacaaccttttcggtcattatcagttcttttttataatacacagacaagccgttcttttaccattttgactgtaataagtataaattcctgaaagtaaatatagtaatttacttaaatgcataataaagtataatattatcatcagtatttatccatataaaaatccccatcttcccatgaaaggaaaacggggatggtgtaataataaaggaaaccgtccgttacatttctttggcatatcctgtccgaatcaaatcggcaaggaatttctcgggcgtatcgatggcaatccgcacacccgactgcaccacataacgttcggcaaaattgtgcatatactgttcatcggtacaatcggaatccatccaactgcccacacgaagttcatgcacaaactctttggcgttgccggcaacgatacgctcgtcaccaggcaacatatatgttttcttattcatacggctaatttttttgttcttaatttataatacagtttttgtttttcccccaagaaaggaaaattttccaacctgactcctgtcgggagtgcacttacagatgcaaaggtaatcattctatccaaaaatctcacccaattttccatctttgtgaaactgatagttcccgaatgctgtctgaactctaccgttttgtggcgcgaataggctttaaggtttactttcatatatctggttgggaacagattctgaagttcttcaatatttcgtgccgagcgtatccgttcatcagagaagcgacagagtgaagtacagaaattattgttgtttcctctgcgtgaaactggcataaatttatcaatctcaatttcggcatgcttatatgaaaggagcaggttctgccaagtagtgatactgaagtcttcagcactcatgtgcacatgcagtccacagcttccattaatctttacattacatgcatccaaaacccaacagactttttccagttcttccaatccgtcttctcctaccaatatagggcttacgagctcaaatgtgtcattcccgttcagactgctatccgtaaccagtttccaacgtgaacgcaaatggtggttgtatgcttcactgttcacttcgatgcccgcctctctcaattcgtgaacgagccgttcacgtgtgcagttatatgcctctatctcgacaccgaattttcttctgaaagaataatccaaatccggtacagtaactacggaagtccgagctgcaggtagcaatccttcatccctcattttcttatatacattccacacgaatccacgatttccacgagtaacgagctctgctatttcccggtgagtaaggccgagcagaagaagtttacgtatcttcgacgtctttgttccagcttctgctaaaatgtttctaatttcttcattcataacgtgttattccctttattatcacatatcaaaggtaatgatttttctctgtttgtccaaattacacacagctctttatcagtgaattagcttacttttgcttctgctaataattgtatccgtcttcctttcaaggagggagtttacacgctgttttcatccgtttccatgcatttactgccatttcccatttgtcactttctttcatgggtggggtcttcggattgtacgactgttccgaagtgcttccggggctttgtggcttcccggggctaaggggctgaaagtcccttagtgaattcctgataaggaagagcaagaggagttcccgcacgcgagaaccttaatcgacgcaaagcgttgatgaataaacaattacatgtagctactatttacttgaatatatacaaacgtaaacaaaaggaatttatagtgctgatttaaaaataattgtactgtcaactttcagtaaacttcttgtaaacgacgtggcattttgctaattttcagtatattataatatattatcctgattgagtaggtgtagcgcttgacatccaacaaccttatatttacctttgtctcagaaacttaatcagtgacaaaatgtatacaaacaaagaaaactctaccaaattgatccgaatttctccaagcgtaaaaaaacgcttggaaatctttcaggccggtgatacccccaacctatgtattgacaggatgattactttttttgaaattaccggatataatccgcgttatgcttccaagaatccgacagcattggtggagaaacggattgaggatctcgtcaaaatagtaaagtctcaggaacgagatatattcaagcctattcttgaaaaaatgtccaatatgaatagtggtcttcaggatgctcccgattatgtccgcttgatgaatgagatacgtgatctcaaggagaagaaccgccagctccaacaacaggtttctgaaaacgaaaaggcggtgtccgatgataatgccgggtacgcggacaaactcaaacgcctggccgaacttgtcaaataccagctcaaccccgacaggtttgtgaaagtaaagttcagcgatgaggtcaagatacccattaacaccctgcagctgctcatcaagaagattgacgaggaatatgtactgtaaagtgcaccagcctatcaataccccgggagtatcggataacaaggggaaatgtacgcagctggtggaatatctcagcaaggagtcacaggatgtgcgtccttactatgataattttttttcacaacaaaaagactttgtcacaccccggactgtcatgcatcatatagacaataaccacagaaccctgaaaagaaatgatgataagttctatatgctttccatcaatccgagtggtgaggagcagagccatctcatagaaaaggtgaccggaaagaaagtcggggaattctcggaactgaccgccggtgaacaggaagaggtactggccgagctgaaaaaattctcccgcggatgcatggacgaatatgcccggaacttttaccgggagaaaatcaagtccggtgatgatctggtatggtatggacgtgtggaaacggaacgccattataaaggcgatgatcccgaggtggaagccggcagggcaaaagccggtgaaaggaaaccgggactgcaactgcatgtgcatattatcgtctctcgcatggacaagacacagaccgtatccctttcccccctttccaaaagcagggggaacaggcagatacttgacggaaaggaggtgattgtcggttttgaccgttcccaatggtccacgcggtgcgcatcatgctttaaccggcagtacgattattttccttattaccactcactggatgaaagcctgagaaaatattccgagaactggcagctacggaacgaactgaagaatcaggcagtctcacagcttaagcaagaagtgctgcatggagagctcaaagaggaaagacgcctatacacaaacactttccgtctctacaggttcgtagtgaatccaaagaaagccatcatccgggaattaaagaaaatgggaacggatctgcttaccggaagggagaggtaagcggccgttcccatccagatatgtttcaaataaacagaaaagaactcatccaaagcctaattcaacgttctacatattgcctatcagctccacttgcagaaaccaatgcttacaaacttatcgtcgattgtaacatattcatgggtattgatacaatggttcccatccccaataatctttatatatttgacaaaacaacacaaaaaacagtgtttgcatctgcaatcaatgaatatcttaagaaagaatgtatcaatatcttcagagatttaaatgccaatgattttaaaaattcattagagaaacaagtacttacctatactaaaggaaatgtagaaagaagctttgaacgcattctttccccaacaggttggggattaaaagaatatgtcccactaaaaaaaaggatattaatttaggagtagaaatataatagttctaaacctatttataatttaagacaccatttcctaaaagtaaatattaatacttatataaatggtgtcttattatatttaaagtaatataaagcatcaatcaaatatctctcattgaaatattatattagtaattattgaaccgtcaacaattttatctgacaccaaatgaaaggatctttattcatcatcaatacttcaagaaaattataattacttagtaataaatgcaactacaattataatacatcccttttatttaaatgcctttattttttcatgaacaaagaaatttttaaatagggacattcagtaaatagtataaaattagccaactaattcatacacaaagcctttcgaattagttggcttttttgtatctttaggtattcccccgaaaataaggtttggcagccaaaacgggggaaattccccaactaagatatggctaagatacaaaatatttcggaaattcacccagttttgggctttacagaatttgatgttttggaaaaatatcgcaagagttttcatgagagtgagcttggcagacttcattcggtctttccgtttgagcatatggcgaaagccgcaggtctgtctgaacgtcatccgggtcgcaggaatatattcagtccttgcgcaaagaaaggaaggcttcaaggacaaggatgctcaaacgtcgtatgatcggacttcttgaaaaactcctcatacagagagatgagattcatcggaagtacgaaaccttcctccggtataccccggagtaccagaagcgtctttccatcatcagaaaggttcttgtacaggaaaaggaaatctttgaagggcggaaagtcagtgaccgcatcgtcagcatcgaccgtcattatgtacgtccaatagtaagaggaaaggaaacaaaatctgttgaattcggtgcaaaggttaacagtatacagatagacggtatatcgttcatcgaacaactctcgttcaaggcattcaatgaggggatacggcttaaggactgtatccgtatgcagcagaagctcatgaatgtgagggtaagatgtgtagctgcagactctatatacgccaataatgccaacagaaagttctgtacaaaatatgggatatccacttctttcgtacgcaagggaagggcagcaaaggatgagcccttgagaaaggtgctcagaagtgaactctcaaaagaaagggccacccggcttgaaggaagcttcggtactcaaaagcaacattactcactcgcaaggataaaggcacggaacaggaaaaccgaaatcctttggattttctttggaatacatacggcaaatgccatactcatgatagacaagatcaggaaacgatcggataaagcggcatgacacgaatttacagacaggatcagaagaggtcatcagacttcttccgaaacatcatgtccaacaaataggattaccttaattccgcaacactattacaaatataactttttaagtacctgagcaacaaaaagttgctcaggaatttgccatgtcagatttttcacctatcttagtgttgcaaatcaaaatatgtatcaaacccgacagacatggcaaaggtagcaattaaatccgagaaactcactccttttggaggaatattttcaataatggagcaatttgactccagactctcatctgtaatcgactcaaccctcggtatgagatgcaggctgtatggttatcaatacagcgaaatcatccgttcgcttatgagcgtttatttttgtggcggctcatgcatcgaggatgtcaccactcatctgatgtaccacctttcgcttcatccgacacttcgcacatgcagtgccgacacgattcttagagccataaaggaactgacccaggataacatttcctacacatccgacactggcaagacctacgacttcaacacggcagacaagctgaatacactgctcctcaattgcctattgtccacagggcagctgaaagagggcgaggggtatgacgttgacttcgaccaccagttcatagaggctgagaagtttgatgcgaagcctacatacaagaagttccttggttatcgccctggcgtggcggttattggcaacttgattgtcggcattgagaacagcgacggcaacacaaatgtccgtttccaccagaaggacacgctgaagaggttctttgaaaggtttgaacaaaacaagcttattatcaaccgtttcagagctgattgcggctcgtgttctgaagagatagtggaagagattgctaaacactgcaagaccttctatatccgtgctaaccgatgcagttcgctctacaatgacatctttgccctcagaggttggaagaaagtggaattgggcggcattgagtttgagctggcctccattctcatcgagaaatggaaagggaaggcataccgtcttgtgattcaaagacagaagcggatagacggcgaactcgacctgtgggaaggagaatacacctaccgctgcatccttacaaatgactacgagtcttccgagaaagagattgtcgaattctataacctccgtggagggaaggaacgcatcttcgatgatatgaataacggattcggctggaacaggcttccaaaatcctttatgggagaaaacacggtgtttcttctgcttatggcactcatacgcaacttctataaattcatcatggcgaggcttgacgtgaagaggttcggactcaaagcaacaagccgcatcaagacgtttgtctttaagttcatctctgtgccagccaaatgggtcaggacatcaaggaagtatgtgctgaatatctattcatgcaacaatgcttatgccaatgtgttccagaatgactttggataacaccgacaacttatagtcgtgattttgcgtattgcctcaagtcgcatggtggggtaaggggcatttatatgtctttatggtgacattcgatgcactgtgccccctttttactaacgatgcagattcttttcgcttctgtatcatattaggcgcgtagttgcggatttgagggattatatgaaaaaaaacagaaaaagggcaataaaaatgacatatgaagtgggtatactctgtcatcttcatatgtcattttattataggggacatttactgaatatccctactttatgtatgaaggtactgttctcaattttgtgtaaatgaattatttagctgattttatactatttactgaatgtcctcaattattaaaaatttaccggacagcaataatcagcaatgagacagcaatgactaaatagctctaatggaattaaaaaattatctatttttacttttcagtctatttatagtcttaataacttcgttcattacttttttcttggaagtttggaatgtttcaagttccttaatgatatttgccttattatggtataaattataccaacctaatgtttcggcagctgctatacgaagttcttcttcttgactttcatttttgacaatattcagtaatggctcaatggctttagtgataggtttatttcggaaccgacttatttcgctttgtatctgcttggtagtactttccggattgccaataagtgcaaaatccctttcaagtcctttcttttggcgaggaaagtattccaacaattcattcacataggaagaatcgtagaaagaccaaccggcagcctgttttttcaattcattcaaagccatatcatggtcgaatgtattgatagcactaaagattctgaaacgatggcggttttcatgtccgcgcaacagatagctttctatccatgccggcaacaattccggattgcagttcttttcaacatattccaccgcataacgacggatcagttcataactgtcattcatggctgtctgcaatacatcggcaacttctgtcggatagttcaaagctaataggcgtaatgcttccaaccgcactacgaaatagttcgattcgtagtaacttttcttcagcagttcaacgagcccactataatttgccattgacaattgacggagcgccattgcctgcatgtcagccataggggaattcagctgttttttccagaatgtaacatttccttcctgcacaactaaagcctggttgatgtccatatccagcccggcattattggtgaaatgaaaagtcgggtcaccgatcagatgattttccaagaagcaggtaaaacgggtgaactgcccgatgcgcataccggcagctaacaagccgagaaattcatccggccatttatcttgaatggtgttaaccgtacatcccatagtagcaatggtcttacccttattaaatatgtaagagcctacaatgttgtcatccaaatggaaagaaccgttgaaacaagcatcgaacagtataaaacgcgcattaggggtcaaaagacgaatatcttcagtatagatatccatattacggtttactatggaatccgattttattttctcctcatcgaaagcttccgcacaccaactttcaggtaccccatactgcttggcatattctttgatagcagcttcacgcccatgcttcttggcatatgaaggcaccttgcttcgcaagaatattttggcattctcaatactcaaattaataccggaaccattttcatagccattgatatactgcatggtggggccaccatgatgatggaatagcatgacatctaatccttcgcgctgaatctcgttcaagtataatggtttcatcggatagcgcatgtcaaaatcatagaacttcaccgtattgcccgatttgaatatttgcggtaattgctcacgtaaggccatttgctcaccgctccatgccaaaggatcttcggaattgtaaccatggccgcgggccatagtcagttggtcaaatgcattttgctttgctttttcggcaacagccttttttaagtaatcgcgtagcatctgataccggttctccccttctaaatgcaatggacggatacgggccgaataaatatccggtgaaatatactgtttagaatcagcacgcaatgtcatataatgatagtcaggcatcaaactgtcttgtttaatataatcaaattttaatccgaagtcatcataataacggtcggaaggaatgcttgatttctgccaattggctttgggagaccttttgaaagccgaagatagatgatgtgcatcacgaatcattggaatagggatgtcacctataaatacgcaaccctccaaaggcgttttctcattctcatgcaatttgacaagctgctcacgaataggttctggccttttccaatcatcaatcagcaagtaagtacctaagccctctttttctatactggtacgataagcatcaatttcacttttcgcttcatcataacttttctgatcgactacaattgcaaaagtagtctttgtttttatactaggatgtacaactgtttgcgcctgcatatcctgtaagcacaaagcggtaattgcccaaaggatgtatttcttcatatttataaacttaatcttttgattgtctgttcaagttctgcttttaaatcttccggaagattggctgtttgttgcatcttctttatttcttcaagaatgtgtggacgttgtacagaattggtaaaccaacctaatgcttcggccattactacacgtacttcctgtggattaccggcatcacgaattacattcaaataatcatccacgtggaaatggaacgtatagttacgcacattgcggattgcactgatacgttttgcttccggtgcagctacatccatcaaagtctgatggacttttgcctcttgtacaaacattctctccagacttcttagtaaccgctttttctcctcgttttcattcaaacggtcaacttttgcataaaagtcctctattactttttccactttctctttcggataaaggcttaaagccttgttggcgctcatttgtacgcgtaaacgttcattatgttcgatcaatgcttccacaatagctggcaataaggaatcgtcacctacaaatccggcataaatggcactttggcgagctaccatttcataagcatcgttcaaaccttcgcgtaatgcttcgataaagttatcgtcctgataacggctcaacaacttgatagcctccatacggactgtattgaaaccgccttcccggtattttttcaggagcaacggagacaattccttttgggtatcgatgtcagccagcatacgcatggccaaactttgtacatcagcgtatgggctgtttaacaaattcttccaataagctttgtcatttttgtgtagcgttatatcggtacttaaagtattggcttcgacaggagcaaaacggaaagtaggatcaccaaacaaatgaccttcaagtgatgcgatcagcttattgtattgcccggctcgtacaccatgggacaacaaaccaatcatttcaatagtccagcggtcttgcaatacgttacgggtatttccttgtgctactaatgtctgaccgttattaaagatatattgtcctgctatatagtcgttttcgtgaaaagaaccgttgtagcacgcatcaaacattatcatcttcggattggtggaaagatttctcttcattaaatcttccgttacgatacgttcatcagcgtagtgaagagagtctgcttcccagaacttaggattgtccaggtctttaaaaaacacctcattcacttgtcgcttttcttgcatctgaatacgtaaggtgtctttatcacgttttccaacatgggccatgactgcattataaagtgtgctcttcaacattttataacgattattgaaatcagtgcatgccaattcatcattaataagctgccctgttggcattccatgctcatgaaacataaataagtcaagatcctttcgttgcaattcgctgaataacttatatttcatagggtgtttcattcggaaattccaatgtttgaatcccatttgacgaccaaaagctaatggaaagttctccatataagctttttcgtcatccatccatacaatcaggcaatcggaattgtaagaaccaccattgaatgaaaatacccgatccaattgattatgcttatctgccttggcagcagcagctttcttcaaatatgaggcaatggccgcatacttatccccttcctttttttccggatacttgatacgagccgaatagaaagtaggatttagccgctggggactgtcttccgtcaatttgtagtagaaatgctgatgatttactgagtcttgcctgatgaactcaaactttaagttcagatcatcatagaagcggtcggtaggtacggaagactgatcccaaggaaaggctttctcattcattttgaatgcagtagtcatgtgttgtgcattacgtaccaatgcgacaggcacatcaccgattaaaaccagaccttccaatgaagggcattcttgatatattttgatgatcatctgtttgacttgatctggattttgccaatcactgctgatcagataagttgccaaaccatcatcttcaaccgcagttttgtactgatgcatggcatctttggtatttgcataagtttggttatctgttataatagcaaaagcggtaggttgcttgaccgatggctttatgactgttgtttgtgcatttcctgccaatggcaaaagaaatgccagatatatgatttttttaatcatggctaattaatttttaagtctgtaatatgtacggccggcttcttcacgaaggttctcggataagctcttatcttttctcagttgatcgcatacccgaaggatgtcaggcttccgataagaatgagtgaaccaagctaaagcctccaataaacatgtttttagcttttcactttcactggagtcggtaagtaaagccaagaggccgtctacacaggcatgtgccatataatttttcagagaattgcaataaaggatgcgccaacgttcggaggtttctttgcttaataactctttttgcatgctacgagtattattggcatcctccaaaaccttacgcatctcctccttgtcttgcaacacataggtctcagccattactttatcaattgccgcctgtacagctgcctgatcaaagacctgaagtcccaaactcacattaaatgccacacgctcagataggttgtcttctacgtaggctttgatttgcggataaacatactcgttcagtcccacatgttgcatcatacgaacagaggtacgacgaataaattcataggaatccgtaatggccaagtgtaagacttcccggaagtttttgtcaccaatcttctcaagcaatcccaagcaggtgaaacgtaccatcatgaacggagaagtttcaaaagtttttcttaataaatcagaaatacccggatagtcattgcgataaaggttgtgcaaagcaaaattctgtatgtcggcatagggcgactgtaataactccaacatgcgggactcgttatatggctctttgagcaaagcattggcatctatctcattgatagattgaaaacgtagagtaggatcaccggtaatgtgcgattcgagaatattcgtcaatttagcccattgccccactcgtgctcccatacctaacaggccgagcatctcgtttgccattttatcttgcagtacattgactgagttggcaaaagtagttacgcattttccctccgacatgatataacgtccggcaatgtaatctttttcccgaaaatcaccattatagcatgcatcgaaaattaccatacggctattaggcttaaactctgtaacttccgataggataataccggtgcgcaggtctagtaaagaatcttctgcaattactttgggatcatcatagcctgcaatccaagtagtgtccaaaccgtatgtgtttttcatcatatccagcatttcgtcgaaagactttttgttgtcttgctttctacgtgctaaaccacgataatagtacttcattgcatctacatgagcattccacctattagtagcgggactaccggaaagatattgacgttcgggcataccatgctcatgaaaaatagacaagtccaaatctgtgcgtttcagcatattaatgacatcgtccttgggataatcgctgaaattataacggatgaaacgggctcgtccttctttatcgaatacgcccggcatctgttcgcggatagtaaaggtttccggtgtccatgcagtcaatgagttagagtaagagccatcacctgtataggagaagaattggtctaatttattgtttgtctggtgctcagccaccacttttttaaaatagcggctgatttgcgcatgcggttcttcgccgttatcaacagctttgacacgtgcagaatatatgtcacaccgaatttgctgtggagattttatagccaaattataatagaagaaattattttcgacactgtcctgtttcaaaaaatcgaattgtaggtcgaaatcgtcgtagaaacgatcgctaggcactgaagaatctctccagtcattgtttttctcatccattttaaaagcggaagtcatatgctgggctttgcggagcattggaataggaatatcaccgacaaataccactccttccaaattatcctttttgtagagcttaacaataactttctttacatcttccggtttcttccattcattgtatacgatgaacgtaggcaacccttcctttcctagaatctcctgataggctttaagctcggcttcgcaagcctgaaaagtccctttatctgtaattacagcaaaagaggtgtcctttactttcacagccggtttaacaaatgtctgtgcccgcagagataatatgctgcagagcatcaaacttccagtgattaatttacgcatgtttttgtaatatagatttcgttatgtagcattaaaaattacatcctaaacttatcgataaataagtacgcccatcataatcatagtcagaggtatttacacgatcgaatacaacttttgcaaataagttcatacgtctgttttcgctgacttgttgcgaatacgtaaccgacccgccaatacgatagtaattacaagtataataattagtcagcccttgttgtaattcggttacagtcggatagtctgcatggctaccaccatatacatattcacctcccagatttttgttatacgcaatatgaacatctattaaaatcctgcgattcaagctatttcctaacacaaaattctttttaccgcctaagcctaaagataaattttctgcattctgtacagaattaggcattaaatattcatcgtcttgattggtataattcacatttaattctgctttccaactatattcattcccgcggtttctgcttaatgcataattaagagaagcggtttgtgtcttgtacgtagaacggatattattatataattccacccagccactttgtgattctgagttatcgcgttgagaaatatactgaataccatcgatactgcggtttgtatatgtggttctcatataattggtatagttctttccttcctgaatcatcgttaaagaaacatgggcggttttatcttttacaccggctatttttttaggagtcgtatagctctgctgaacagtttccgcttttacatcgtaactgccctcaagcagtaaattgaaagacggcatactgaagttgtactggagagctccaccgaaacggtctccaatataattgctggttacaccgctgcctattccttttatggctgttcccaaaccgtataatatataataatcttgatccacataagagttgacattactcattcttgagtcttccttgatagaactatacttgaaacttgcaccaaacttgtgtgaattattcaacctgtaagtaatccccggtgtcagttccagcgtataaaaacgggtatccacacgcgggtcacgctgtttggcagctaatgtagctacataattaccttccaaacccaatgcccaatgattaccaaataaaggagtagctgcacgaaacttcagatcgtaatattgatttctccatttacttaagtgctggtctgcgatatagtaaggcattcccctgaatggatcggcaatggaggcattatatccggcatccgtcagattgttttgtgcaaaattaaatgctccccatacatatgcatttttcagattgataaaaccttcactggatacacctacgatagtctctttctgcccctcttgcggacggcaatagtttccgtcctgtaagtcatatcccaatataacattcgaataattctgaatatcatcgaatggcataccggcagcattctgtgaatgagaccatagtcgttttgttttcaattgttccatagcggcaggagagaaaccctgtgccgctcccaccatacttacaaagcaggctatcactaccagcaggcagcttttcatatagttcatatattgttttttcattgttctgtccttttaattaattattgcaatgtgtgattccatgaaggcatttttgctccattacgacgcattacaggaacaacgccacgttcaaagtcatccgtactgttgtttgtatcctgatatatgtatgtgcctgtttcttcgcgaataataggattaccttcttcgtctgtggacaatttacgagcaatacctaaaccgcagtaagtagctcctacccaagtaatacctgcatcaagtacaccgggaacacgttttgcattcatctttgactcattgtctactgcttccacagcatccaatacatatttaacaggtattttagcataataaacattactgttcggtttgcttagatctgttgtcttcatattttcatcattgaccggatcccaagtttctccttcaggaacacgaaaaatcgcataagcgcctccaaatacggatgtcaaatactgtggtatgcttcccatctctgcttttccttgatagaaaacatgttgcatatcataagctgcctggtcagggaaatttggattattcatattaaactcaaactcagaactactgccgtcgataggactttgagggttatagatgtccaactgatgattagcggcaaattgagaaataatgcaagattcacctggtgctaacggatattcggttccatttcctggaaatttccacacacgttctccatatgcataattattaccatccgcttccggccaaattggtagtttagtagtagctgtacctggagttagatttgcgaaataaataccgtccaaatacaaaacgtcagcagagttattgtatatctcatagaactggtcgcggaaatagactccccccttttcaggacggctaccgcaataataaatctccttgaaaattaaagggctcactttaaggccttgcacttcaatattcaatgcgctgccatggtgaaataatgctgcatttacagagttaccattgatatagtactcgctattttctgtatcaatagctgtaccggatactgttactgaataaattccggggataatcccgtcaactttcacactattatcagttacttcttttacataatgtaaatcttcatcgtaattgtcaaactttacagtcagatctttcagcgtggatatattttcaacggtaatatccaaatatacatcaactgtgataggattcacttctgctgcaccagacatgtccctgaaggaatcgcatcctatcaaaagggtacttgccaatgtaaacaaatatattaaatattttttcataacttcctaaacattataaagtgagtgataattccagcccaaagaaaaatcggttattcaattgagtatacgaacccggattacgtttggattctctgcgcggataacttctgaacatattgttggcaaagaaagaaacacgtagcatatcgctaatttctttagttacattcaagttaaaacaaaaataaggactatatgattcttttatagcattattatgacttacattattcaacatatatccatatcctgcatcttttacttgctgggtagtggtatattgcccttcgggaaacatatttacagacgcatcttccaatgctaaatagcccacaggtatagaatcgtttccaaatgtattccaattagactgctgccaaatagcttgtgctgtcatcgtaacaacaaaaccgatacgcgggatattgtgagtggcacgtaaagtcgttacaaattgctgtttataacttgcattgccatcttgagaataaatggccaccggtttacgggctgaagcagcatcttcgctattgtcatagaagctataaccctgacgccaacttttagtacgcatccatgaaccatttatttggaaagccgtacggatagcatcaatacgtccgatattcaaatcaaattctaaacctttggtttctatatttaaattattagttggttttgcataagtagacaataccggtaagctactactaagttctattccgttttctgtgcgctgatattcattatagataaatgtattgaaggtattgaaagtttggctcattacataaccatccttcagacgctccttataagctattacattcagattggttttacccactcgtaaattaaatccgacttccgccttatgattttgggcaatctttaaatctgagttatctacttgccgaacttctgtggtggtcatgaacaaacgctggctttccggaatgttttcattggcaagctcatttatattgatatattcaaaatatgcattttccggatataaatagagaagagaaggcatctttgcagcaataccgtaacctccctgaagacttaataaattcggaatcaaatcaatggatgcatttacacgtggcgagaaaatgccccctactactgaggtatgatcataacgcacaccagcctgaatgttcaaatcatgcgtaccgcttatagaccatttaaaattatcttccacatatgcaccaaattggttaatgaaaggaatatccttatagttacgtggacggaaagatgaattatgaccatattgactacgataaggaggagtacttgggtcataagtttttcccttaccaacattaccgtcactccggaaatccgcaccaatcaagatgcgattgtttacatgaccgctcgccttgaatagagaactcgttaccttagcaaacaaattaacttcacgactatcaatttcatagtgtcccaaatagctgcttggcagataaacagcataatgatttatgtcttccggtccaaaattagtaatttgattaccattggcatcatagatgtgctgacctgcaaagttactaagcaccgcaccgtttgtagtggtcatggaataaggagatgtagcagaactgtatacggtttcataataactgtctttatccatatacgtacccgacaatacatagcgtagtgttttcaaccagcccttatttatattccatgtaccattggtattcaaagtaaaacctacatcacgaccttccgaggcagttttagtttgttcgtcatcaggattacgttcacgctgatccttaccataaataaaatcaaagctggaattggtacgtaacttattattaaagaaagtatttgaatagagcaactttgttgtggcacgctgatagtgctgataactggatatgggattattcgtattataagcataatctgcacttacatttaaagcacctttcttttttccaagttcaaaaccggttcccatagacacctgatagatattgggattggcttttgctttgatacgtagcggctcacgaccagcttttgtattaataattactgctcctgaggtcagatcaccatattcaacagaagggataccacgaacaatttgtatagattctatattttctgtagaaatactgcgaacatcggttccaccagccggcgaggcacctccggccaatgaagcgggtgtttccgtaccacttaataccgtagggttcatcgcagataaattagcattatttgagatgggggcaccatcacgaattattgcagtacccatagcattcatcggagcttccggaccactggaactggaaacttgacggatgttaatctgttgtgccgaactcatatcctgattctgtgaaattccacctggcatcaatgacattacatcatataaactggtcgcttgcatatgatccatagcagagcgggaaatgtgagaagatgtggatttgcccgaacggttgttggttgcggttactgttacttctttcaacttaaaatcctcattcctcattgtaaaattaagaaccaggtccttacttacatttattaaggtgtcaatagaaactttgcctaaatattgaatttgcatacgaattttaccagtaggtacattttccagtgtgtatctaccattttcattagaggttgtccctaatgaagattctggaatggacactgctgcgaattctaaaggtaaaagcttgttattttggtcgtattcgtaaacaatacctgtaagtttgactttgtaattactttgcgctttgacaggaaaggtggctcctatgtacattaagtataagtatacaaatactatattcaatactcttttcttttttttcatactcatatattaataattatggttatccttaccactaagatttatatacaacaacctttaaaaaatagcactttaccttggcatcaccagacaacatggttaattctgatattagcaacaatagttaatttttatttttgggctatgccgttttattacattttactacattgtttggacaatctcattacgtacagagattatagaatataatacattacattctctcagaagtacagttgctggttttccattttgcgtgcaaaaatagtcactacttaacactgttaaaataccattttaatagtataaaaatgaattaaatgaaggtgtgtcgtaatgcacgatgcaccttctttcttgtttatcaccgatataaatcggtttattttcttcaagctgcgataattcgaagatttctttgatttatgtgtctccagcatctaaataaagcgacagtaagctcataaaaccatcctatcagccagttcataccttcttttgtcagttttgcacacatcttttttatattgaaggcaatggctaggaaggcaaagtccatgaagaccttgtcctttccaaaatgtcggaaacgtttgtagttcatattgtttttaatttgtccgaacacggcttccggttctatgcatctctgccctctgtgtttcagtcctttctctgagcagagcagttctttggctctccgcttgtattgtctaagcctatgattcagttctatcgtcctgtttccttttgctttaaaacagcggcatcgcaggggacagccttcacacctgacagctctgtaccgtgcattttcgctgacatatccggatgcggttttcacattcctggtgcctatcctccgcatcctttgccccataggacagatgcagaagtcatgttcttcattgtagtagaagttttcggccttgaacgggtccggtttgaatctcggccgctgctccatgtggaaatagttgtactttacgtaggcttccatgccgttttcggacatgaagcggtaattctcttcggagccatagccggaatcagcaaccaccgtatgggccatccggtcatacctgtttgaaaaagattgcaggaaaggaatcagggtcagtgtatccgtagggttcgggaagagtgcaaaatcggtgatgaactgattttcggtgccgatttgaaggttgtaaccgggcttcgtctgtccgttgcgcatggcatcctccttcattctcataaaagtagcgtccttgtccgtcttggaataggaattcctctcttgcagtgtttccagatggcagtcgtattcctgcagtttgtccctgtgttcttccagttccttcagctgtttgcgtttctttttcagttcagtcttttcctctttcgcggatggctcggaaacctgttccaatgcatgacgcaattctcctgccatttcagtcagcatggccggagtgaactcaacctcctcattgttctctgatgacttctcccgggcaatgacatcgtctatctgccctaacaggacatgtatcttcttcatcaggcgttcacggttccgctcaaccgtttttcgccagacgaaagtgtacttgttggctttggattcgatctttgtcccgtcaatgtattccacattcaggctgatgaagcctttggaagagagaagaagtacggtttgcgtaaacacctcgttgatttccttcttcacccggttgcggaaacggttgatggtaatgaaatccggtttctcatatccggccagccagatataatggatgtcacggtgaagaagcttttcaattttccggcaggagtagatgttgttcatataggcatacagaatgaccttgagcatcatcttggggtggtaagggctgcggccgcattccttatacagctttctgaaactttcaagattcaagccctcaaccagggcgtcaaccatgcgcaccggatcgttttctgcaatatcctcatcaattctttgaggaaaaagaacggtttggttgggaatgtaaggacgaaaatgtatctttgtcatagtgaaattcttatgcctaaagatacagaatctttaggtaataacaaagccccagcttgtgaaagtcggggctttgtacgtaaaataatgaaggtgtgcattttgacacaccttcatttagcattggtgatgtggtgctttgaacgaattgacatactcccatacctaaaggaacgggctttctcgcacgtttagcgtaagatagttgtggaatgaaatttatacacgaggagttattatccctgcctatgtaaatacaacaatccccctactctgagtaagggaatcgtttggttactgttctgatggttcatggtgtattcttcatgccaggcaagaaaggctctagcgctttcaccgcttattggccgagtatcaatccattctttccattcatcggtcagttccgactgtgcttcaacgaactctactaatgttattttaccgtcttgctgtcagtttatattaggtagatcctctcccaattatgcagatagggaaagatgatttggagtgtgaacctataccactaataggagcacactcgcccaaacgacacaacaggctgcataaaataaatacaaatgtttcgttgtatggaaacaaaagattacctttgctgcataaaaacaacaacttatggaagaaaagactaaattcaaaatcatctattcaaaagatgcagatgattttctgaacaacttaccaacgaagattaaagacaaaatgaaacaatgaaattttatacagaagaagaaatattagataagcacatagggaaaaaaggcactcccaaaagagatcagtttgaagctgatttaaactctttcttaattggtgaagccattaaacaagctcgtcagtcgaagaacctaacacaagaggaattagggaatctgataggagtgcagcgggctcaaatctcccgaattgaaaacggtaagaatttaaccttttccaccattgcaagagtttttaaaactatgggaataagtgctaaacttgaaattaggagcataggccaagtcgcattatggtaatctgttgtatacaactattattcttattgaagtgatgaatttaaacagcaaaaagatgtaatgtttaactagaatacagtctatccggttagatgattgtattcataacattacattaaaatgagtagatcgaagaagaagtttcccgctggagtatggtgtgggtgcaaatcacagaagaaaggcaaaagagttgcgtccaaacgttttagaagatatacaaaaatactaatagctcaagcaaaatacgatcttctgccaaaacgttcaattgaaataacttctccctgggatttgggtggggatggtaaaagattctatggttatcatccggaatgtgaatggcatgccaggattatgcgcaaatgactaagatagttgaggaagtcctcccccaaaaaagggtgtttccctaccccttcaaaaacaagaggttgtgtcaaaacgctgacacagcctttttttatgcgcaaagcccagactttctcaagcccgggctttgttattacccaaagttttcgtatctttaggtataaagtttttcgttatggcaaagttacattttcgtccttacattcccaaccaaaccgttctttttccacaaagaattgatgaaaacatagctgtgaacgacccggtccgcatcgtgaatgctgttattgacaatctcaatcttgagagtttcaagaaactttataaggaaacgggccgttgtccttatcatcctaaaatgatgcttaaggtgataatctacgcctacatgaataatatctattcttgccgtaaaatagagaaccacctccttcgtgacattcattatatttggcttgccggtaatgagcatccggattttatcacgatcaaccgttttcgtaaccgtgtaaaggaggaaataaataatgtatttacccagttggttcttgtccttgccgataaaggtttcatcagccttgatgtggagtatatcaacggcaccaagattgaatccaaagccaacaaatatacttttgtctggcgcaagacagtcgaacggaaccgtacgagactaatggataaaatccgtattctcttggagcaggtggatgaagccattgcacaggagaactctataaaagacacatccgtggagtttactccctgcaggctctctgacatagtggatgaacttaaagaagccctggaacgccagcctgtaacaaaggataaggaagaaaagaaagccctgcgcaaaaagaagaagcaggtcagggaacttgaagggtatcgtgacaagctgatagaatacgacaatcaccttgatacccttggagaacgtaactcctattccaagaccgatcctggtgccacattcatgcgcatgaaagaagatgccatgaagtacgggcagaccaaacccggatataatctgcaaataggtgctgaaaaccaattcatcacagacttccgtctgtttcccaaccctaccgatacactgaccctcataccttttttccactctttccagtaccgctataaccgtttaccgaatatctgtgtggcagactccggttacggttcggaagaaaattaccggtttatgcaggagaatgggatagaagccttcatcaagtacaattacttccataaagaacagcgtccccgttatactcccaacccgttccatgccgaaagtctccattacaatgtccaagaggattattacgtttgtcctatgggacagcacatgaaccgtataggaaccaaacgtgacaagacagcgagcggatacatcaccgaaagtacccggtataaagcaaaaagatgcgaaggttgccctttgcgtggcagttgttttaaagctcgggggaaccgtattatagaagtcaaccaccgattaaatcaatacaaacggcaggcacgggaaaggttgctctcagaagaaggtatcaagcatagaggcaggaggtgtatagaaccagaggctgtgtttggacaaataaaatacaacatggcatacagaagattccggcatatgggagaagacaaggttacaatggactttgctttctttgctatagcctttaatatcaaaaaaatgtgtgctaaactgataaaagaaggaaagggactcattacagttgccaaatatatgtttatggaactatttataacccgatataattggaatatagcaacttgttgccaaatgcatgaggaaagagcagcatagccaaaagaaaatatagcagaactgtaaaatataaaagaggttgtgccaacgttttgacacaacctcatctcttcttagaaatttattaacaaaaaatgtatcaaaatgagaactattacgatacaccttcactttagtgtttaattaaatttatcgataaaaatttatcgaagcattgaacaaataaaaccgtccgctcgggtagaatccgagcggacggcggaacagcataatctatagcagagagaatctatggctgctcatgttttattattctcctgccgcttgcgggaagctggccgggaagaagatgccggctggaaagtgggtgtagtcgcggtactcatgcactatcttcagtccgtttccggtgtcttccagttcaaagatggagttgatgaggaaattccagccatatcccttgattcggttcatgtagatgtgcccggttatggggtgtacggcgatgggattgtaggtcatggtcatttcggaattgaattccttgacatcgcccagcatcgtggttgtgcccgtttcaaagtcgtgacggtagatcttactgcccagtccgctgtagtacagcttattctgataagctgtgatggagcatccggcacctgcgccagcattaagattaacctcggtcacaacgtttgtcttgatgctttcaccggtcttgctgttcaccttggcaatcttcgcggggcttccttgcatgcttacccaaaggttgccgtcgttggccttggctacagccgcaatctgctgtcccatgtcaatggtcttgccaacggtggtctttcccttttccaatacgagcaacttgctgcctgcgatagcaaacacctttccatcggctacggccatggtcagcttgcctgcccctttggagccttcgatgagggtttcgatacctgcctcgctgtcaaagaggtgcacgccgtagttatcgcggataaagatgtttttctcatcaagcacggcgatgtgtgtgggccaattcagggccgaaagttcttcattgaaagtggcttccttgaccaaggtctcgctattggccaccacgagcatgccgtcgttatcgaacccggttcctacggcattggtctttccgttctgcgaaatgatgtacatctttttgttaaagatgtagatgtcttgcgtcacgttgcccagctccgtaccgttcatggtgcggtaggcgtagtccagtactttgccttccttgtcaatgtagatgagcgatccgttttcggtggtcatgtttccttcgttgaggatgaacacgcctgccgggtcggcaaatccgcttcctttcacgctgacacgtgcgatggccaggtatacgagaccgttttcatcggtgccctggaggcgcagttcccctagtcccatggtagcattggcgggcggagtcacggccacgtaactgttggcgcgatgtacgttcgtggtccatccttcgggagcagagagcacctcgagggtcttgagattagccgagaacttgatgttgattcgggtttcacgtcctggtttcagcaggtagaaaggcattttctggtcagtgtcgaagcgtaggaaagtacctgtctccttgttaagtacaatctgtgagtcatcgggcaggacgaaagtcacgcttttatccgtcacgatgatgtctttaaagaaagctccgctttcgcctttcttgaagcgcacgaagtcgtcgttggcatcggtcacgcgcttgccgttcagtgtcaggtagccgtgttcgtccagcgtgagttcaaccgtattgtcggtcacagtaataggttcgcctgcttcattgagcagttgtgcagggatgccgttggtcacgatggcccagtagtacacgccctccacttctattatgctgatggcggagccgttggtcttcttcattacttcgatggtgctggcgtcgttgaaagtgattacgtagccccgtccgtcttcggtctcctttacatcggtcaccacttttccaccattgatggcatccacgatgccctggatggagttgacctgtcctttcaatgcctcgatgtcggtcttgagttcgtctatttggccgtaaatgtcgttgatgtcccctttcagttcatcataatggtcgtcacaggctgtgaagctgaaggtcagccctatgaggagcacgagcagtttaaataatttgttcaaatacatgttttcaattcgtttttagttagtatatggttatttctctctgtccgtttcattcttccagagtggggatgcgcttgccctgcatgtggaggtcttcaccgcgttccacttcggtagagcattcgcccaaccagccgttttcttggtttacaccgttatacaccttgatgaagtccacaccggggagttccacagggttgccttcccggtcgacggcccagtctatgtcaatggccgagttatcatccacattggggctgttgtccacatagccgtatcggaaagaatagagtacgaagtagacgcttcccgaattgattcccggattgaatttgccttcgttgatggcattgttggccaggcggataccgtggaaggtaagttggttctcgtctacccaggcgggatagtaggtttgagtatggtacacgttcttcaccttgtactcattgttgccccgattgtcggtccagcgtatatagtccttgatggtaatgtaggccaacgggttgtctggttcggcgctctcttcgggttcttcccgggtgggtcggtagtaggtcatttcgtagtcgcggaacacatcggtgtcgttcccgttctccacggcgatactgtaccaagcttcagttttggtggtgaagtttccacttccggctatttcgtaccactcgtcctcatcgggccgtccattcttgttcttgtcataggccaccatgactatgcccggctcgcagctgcctcccttgggcgcatcgggtcgtccgttgtcgaccgcgtcgaatgcattgccattgatacggaagtcacgcaatccggccacattgggtatagtgtggtcaaagcctacgaccacgtatccgccccagcctcccagggtgatggcataggcttcgtcccccaccagccactcgccggccttgcgtaccatgtcttcgtgggtgtctccttcctcatactcgggcaacacgttgacaaactgtccgggtgccggcatatagtcaagcacggaggcaatattggaggtcagctttccggaccgctcctttacgttgacaagaacatgtgtcttgcttccttcgttctcggcggtgaggatgtagcgtccttcgcgggcggcaatgaacgaggggatatcggtatcggccccggtgaggcggtacagatcggatgctgcggaggtcactttccaggtgcctcctctcagcggggtgccgtttagctcaatggggaccaccgtgtaagtttgcgcttccagtgtgacggtgcttccctggctgatgacattcaggcgagcggttttctcgtcctttccggcttcattgctcacttgcagagaaagggtgtgggtatatgcttcattcccagcgaggaaagtgtaggttgcttcgcgcgacacttccgcaccgtccagtgtccaaaggcaggtggcatgctctccgttttccacggtgggggcaaaagtcagctcttcgcctgccagcagggtgtattcactttccaaccccgcgatggcggggggcaggataccttccatactctcatcttccgaggaacatgcggaaagtagtagggtgagggccaataatagaaaagagtactgttttctcatttttatttaagtatttagtttgttagtttttgagtttgtaagtttctaagttattcctttacattggtttaagaacttgtagactaataaactcatccatttaatcatatcagtttttaagagtgttttttcattggaactgcagcaccggatcaggctgtgcactgtccgacttgtaaatgggaaccagtgcgaagtgtccgggaatgttgcccgaacgttgcacccatttcttcttcccgtatttgtcaaagcagtagagggcaccgggtgtcacgtagttgcctgcatcggtgatgtagatgtccttggtttccgggtccaccatgatgccgtaaggcatttcgatttccttattagtgccatcggtaatgatgttgcgggtaactatctcgtgtgtcacggtattgacaatggagtaactgatattccagtcgttggtaatgtagctccattctgtgccgtacacgtaaagcagatcatcgtctatccagtagttggtggcggctatggggatggtgtcggttacctgctgctttttacggtcgatgaagaagaggcgtgcgggcagccccttgtaatcgccgcgcgaacttacccacagatcgccccggcggtcggctttaatgcgttccaggttgtaggccacatcaatgcgcctttcttcggtgaaggtatagatgtcaatgactgacacggtgcgttcgtaacccgaagtctcgccagcacccatgtatccgccggaattggccacatagattttcccgtccactatttccagttcgtcgggttggtatcctaccaggcagcgatccaccactttcagggtagcggtgtcaacccgggccacgtaacctatctgttcgtagttagggttgatttccactggcccggcataggacgtgacataagcgtaccgcccggcaaacttgataaagcggcagttgggaatgtctatctggccgattcgtttggcggtctggtagtccatcacctccactttgttggagcagttgatgacggcatacatcttgcttccgtagatgccgatgtcgttgcccacatcgcccagttccttgggaacggtggggttcacttcggcatagatgttgcgggtgtatatgccggtggtaaagtcatagtagtccagtgtggacttgttgctgcccatgttaccttcgttgagcaggtagaacccgcggtaaccgtccggggtgcgggtgtagcccgtgtattcgtcttcggagagaatcatctccacatcgtcccggcaactgccgagggtgcagagcgccaggaggctgataagtgtgtagcgtatgttttgcttcatatttcaacagtgaatgacagtttgtagttgcatttgggcatgggatagttcagtactacctcgtagtcttgtgccagcaggttgttgacctccagtgccaagcgcaggttggtatccttgactttgaagtttttaatgagggccatgtcgtgcgtgtaccatggctgttcgtagtcttcgcgtatgttggctgaactgtggtagcgttcgcctacatagatgaagctgtagttcaactgccacgatcgccagtggatgccagcgatgaccgacccgctgtgccaaggtatataaggaatttgaccgccataggtcaggttttgtagcacgtcgcttttgcgtttcgtaaagtcctgtgctttctggtaggtgtaggtcaggcgcaggttcagcaggatgtcccaaggcaggcggaattctgtggtggacgaggcgtcaatgccccgtatttccacgtagcccaggttcatcatcatccaacggtactgcccgtttcctttgggcacggccacgattttgtccgtcacctcgttgtagtaggcatctgcctgcaggtcgatgcggcttatccatccgcgtttgaacgtctttccatactgcatcccaaggttgtactggtgggtgaactcggggcgcagggcaatattgccgatgtccgtataatacagatcgttgaaggtgggcatacggaatatctgcttgtagaaggcgcggatgttgaaatcgtgtctcttgaagggcttgtaagacagaaagacggcaggagtaaattcccgcttgtcgggagctgccttggctgaatcttcctgagctgtgttgccggagcgaatgcgttcgcgcacccaagtggcgagcaagctgctctgtatcttcactttacccaagtcgagcgcagtggccactgccaccagagtggtcagtcggcgggggaagacaaagccgtccatgttcgagtgtagaacgttatattgcatgtcggccgaaagggcgatgtcccaaacgcggttgacggcatatttgcttgccacggaggcatacacttcctgttgcttgaaggtgttgtctatcagcattaacgtggtgtccgggttaacatagttcatataatcgtaggcgtacttcacgttggcttgcaggtcgaaccggcgggacagggatttctggaaagtgccctgtgtaaaaaaattccggtcggtctgccgctgcgagttcttccatacattatttacaatggctccgggaatacccttgttggagtgataaaagtaactttttattcgccagaagccttcgggtattttgccatagagtccggcttcgatccgagtggagaatacgtcaccgttttggcgcacggcggtagtgtcgtacatcacctggtgggtgttgggatacacccgtttgtagcggtacttgtattttccggacgagttgataacctctgcgttgaacgaagcactcatccggtcactgaacttgtattcgtagaggatggaagggtcgatcaaatcgaatgagcctcccttgacggtggctttcagattatacttctttccctcggcgaattgtggcgtgcgcgaacgcaggtacaccgagcctgaagaaccgaagtccttggccggttggaaaatttcgctcttctgcccgttgtaaagcgagatttcttccatgttctccaatgagaatttacccaaatccacctgtccgttttgggcgtttcccaattggatgccgtcatagaaaattcccacatggtgggtaccgaggctgcggatgttcacagttttcagtccacctattcctccgtaatccttgatttggatacccgagaagtaacggatggcatcggccacggagaaactgttcagcgactgtagagtgagcttgtccattttctgcgcagggataacttccttgtacgacttggcggtgaccaccacttcgtccaactgttggatgctgtccagcctgctttgtgcccataagggcgtattccctccaatgcaaatcgcaaggaacagtaggatatcaaaggacagatgccttctgcatttgcaatacatcatacgcgttgtatgtttaatattaagtatttaggtctttagtttttgagtttgtaagtttataagttgttgctttgcattggctaaaggactcaaaaactcacaagcttaaaaatgtaaacttaaaactgaccgttgtcctaaccccagaggacaggaggtaatgaatgatggcaggtcttctgactgactcccctcgcgaaaccttcccaatgtaaccgttacatcagtggcataagtatttttcgcaaagttgaaaatggagtttcacagcagcgggactgtccgggattttcacccgattcccttttaatctgcttgcccggacggacaaaacagaaccatttcaagtgcaaaggtatttaaaatttcggataaggcaactgggaagaaaagtttttttcgttgccggcgaggaaagggcggaggtttccgcaggggaaaaagaaataggtcatatcctaaagatacatcctctttcttattccaaacggttattctattttatatataattatattgagaattaaaaaaatatcaaaatctaccttagcagaggatatgattaatagaatagcatcacttagcattcccaatcagattcttcaacctttaaagtcttagtatgaatcttgctgctaaagtagtctataggtgtttgacagggtgcatgtggatcatcatagtatgtgaaagttccttgtgtgctatatgagattgtgataggagaagcaattggataatccgcaaaggcttctactgtaatacaagaaccagaacctatatgccgttatcactattcacagggaaacagttcacggacttcatcaagtattcttgcaaaattcctgctgatttcttcaggttccaataccctgacatccggcagaggtttctcgttcttctggttgaactcctttaacttcaccttgaaatagtctacattggcacgggtggccgaaccgataaactctcccggttccaaatccgcaaaatcgcgtccttgatagatgtcctctttctgtgaggatacggtcacgctcctgttcgtaccaccgccactttttccggtacttctggatttccgctccttttcctccttaccgaatatcgacgggtaatatttcaatgcctccacgtctttggtacgtccgagaaagagatttccaaaattggcttccaccgatgccctgtcgagtttaccatacaggttctccagcttggaaccggactgtgtcagcaggatgaaagcgcacagatattcacgcaatactgaaggcagcgtttcaaagttcttgatgttcaccgttgtcatttcatccagaacatacacgaacgggatcttgttctgcatggtgaactgtctggccgatatactcatgagcatgcctatgacaggtgcatagaccgagttcttggagaagctgttgctgatggcaaacagtttggggttttccgggtcgatcaggttgaaatcaaaatcatcccccgaaaggatataggcaatctcctcgttttgtgatatggttgccagattattacacagggtggaaagataggaggcctgtgtcttctcggagccttctgccttcagataagcaccggccatcatttccgaaacaagattctgctgaagaaacatggaaagctgccgggaagaagccgtcatgatgaacgccatgatatgaggcagcgtacagtattcgggaaactcgtcccaaaacctgaaagccactccacgcagaatacccagcccaccggccacccattcattctgctgttctttcttgggaagcagcgcaagcaggatatcctccatgagctgcaacagttcggtgcggtcctttacaactttcagcgggttgaaacggtatgaacgcgcgggcctgtcaaagctgacataataaaacttgtgcggataaccatgcttctctatcaggttataggcagtccgggtataatcgatgtccttgaagtcgtatataaagccggcaaaccccaaacggatatattcctccaacaaccacttgcctatactcttggtctttcctgaaccggctccgccataaatcaggaaattggaatagtaataataaaattccagatagtttttcgatattcccgattgtacggggagcctgatcgggttattgttttctccggggcttttcggtttgccccgttcccataaccatgacaggacgaatatgaccagggaagcacatgccggataaaacacatatgccggaaaaaacagatatgccagacaggtttcaacaattatgcaaagcaaaaaaacaaagaaattgatataccatttgcgacttatggtggaaactcctgttatcagtgaagccactgccaatataaacagcttgatataaatgacacaattctccatactactataataatttactttaaattcttatcaatttgatggattaatttgaaagacaaacgcttatggaagttctgaaaagtctaaggtaacgatttggagattgtgctaatttcagtactttacagtctcatacttatgaacaacttttataggacaaagatactattttttttgaataagagaataatttcacaggaaaaatagaaattttatggggaagtgttctgatagcatgtcgttgtagattgtagggaggggatgtaaaacggcaggcacatagaatttccgatattcagaaagccgtattcccaaaatagagattatttttgaaagaatcacataatccgctaagaataaaagtttatgcggatcatcaaaaaacgaggtaacgagttggcaaccgttctggtttctacatacttgcatcaattgcgttgatgtgcaactcactttatgtaaaggtacgattttttacggaacatgcaaaacacctttgatttttcttttttagcaaccgtcaaaaacaatctttcggtttcatatcccggtcacaaaggcggtacagtctctttatgaaaagtaaacaaaggtcaggcaggattgaaacagactgttacgagaacagtcagaaaaggattgcatacaggaattacagtctgataccgggcaggggacgactttgtgccaaagtccaaaaagaggttctttttccagacggcaaactccctcacctctaaaaaacagtctgtggctggcgcacgcaaacgtccagcctttatgcggacagtcttaatgcccgcagcctgtacaagtgcgtaaaaaacaggtaaatggaatcttcatccgcttccccgcgccttgccgacactcctatattcccgttccaacacctgctcgatctcgctcctcttgtacaagaccttgccaccaagtacatagtaaggcagcgtgccgttgctccgatactcgcccaatgtcctgcggctgactttcagcatacacgccacctcactgtcgcacaggtacacgtcttcttttggcggaaccgcgccatctccgaaaatgccgtcaatcatcgccgacagccggtcgatacgctcgtggatggactgcatccacgcatcgtctttcgttttcaattcattaaacattatatagattaatttgttatatgactcattttgtaactgattctgaagttgtgtaatccacaagcaataagaatcaccatatcttcgaaaccgaatttatggcatctgaatcgttctttgacaatacggcattttttcataccacctatggcatgctccactttaatcctaactccggaaatccgcttgttctcttgtttttcaacacaagtaagctctttccctttaggtttctttttgggcatgcatatttcaactccatccggtttgtgtccgatgaaacctgtatcctgccagagcctaatacctttgggaagtagaagaggttcttcatcacaaatctttttgtcatggacatgacctttgtatgtggagctcaaccatacaatccgaagattgttagtacataacaggttattctttatgctatgagttttttttaccactatagcatgcagactgccagtcttcatccaaaggacgctgaataggtcgctcggttccgtccaacaagacttcttcgcacccttgaagaatgtgtatcagacgtttggagttacggtcaggcaattcaccaagcgttttcaatgtacgccggagaatctcagaaagaaggtgaatccatctattggcctggggctgggtcatctcaaactgaatagcatggagttcctgaaggggattggtcttcagatataccaatatgaagaacattttgtcctgaatcagagacaacactgttgtaagatatacgttggcgcactttaccttccaaggtaaaatggctgtaatattcatcccaatggtacttgaaagttattagcaaagcgtcaaactcagcaggagttaatcctgtcgcagcaagcacttggctatgacggtggcgaatcttgtcgtaatacatcaattgaactttttagatcacaaagataaatcaaagaacgctttaatcaattattcgatataaactctattatacatactgctcatttgtcttttgttgatacttcagttcaattccttcaaatggtgtgccccctgtagcgtgcatccttgcgtctgtcctccactttcgtgacgatacgctccacgtcttccggcaggtaataggtacggttgcctatcttggtataggcgagcgtgccgttatcccgcaaggtctgcaaggtgcgcttgctgattttcagcttcaggcagacatcctggtggtcgagccagccagccgtcctcttcacgcctttcaaatccagatggggattccctccaccctatgtatgaaccgttcgattttcatggcaaattcctcgaacgccttcctttcaaaacatacggtttccataacaatccgattttatgttgatacttcaaattcataccatccggagaaacggtcactcgtggtgccggtataacagcgcatggaagaatttaatctgaaaactgaccgtgcagatgttattgttcccgccgctgagatatttctgataattgcaggtattgtcaaagctgagtatatccatgttccggtcattggcttagcagatggtattattgacaatttgtatgccatatacctgaaaacggaataaaaggaattgtgcatagctgttttaactaggggatattcagtaaatcctataaaattagccaactaattcatactaaaagtattgcgaattagttggctttttgtatctttaggtatttcccctaaaattttgaagaacgattgacaaatgcttcagcggagtcgttcaatgctaaaatcaaagctcttcgaagccagttaagaggggtggctgatctgaaattcttcatgttcagactggctaggctatacgcttaaaggaaagcttgccaaccggaaaaatccgctgcccctggaaaaagcagcatagccaaaagaaaatatagcagaactgtaaaatataaaagagtttgtgccaacgttttgacacaaacttagcagattactattcagctgatacctattctgaaagatgtaaacaacttgtttcttagatagccttataaatattctactacttattacagttcatttagaaatgttattctcacttttattcctccgctttttcacttgctccactgcttcagatatgattcccttgttttcaaaacgctgcgtgtaattggtgtaatccgggtgaatacgttcgtaagttgggtcagtgaataagggactcgtaataatgtggtccgcagtcgaacggttacagcagaaaacaatattttcaactccagccagtctggtcaatgctttcacatccgtatcatgcggctgtagtgtcatcggatctgtaaaaaagaacagatagtctatttctccttctacgatccgcgaaccaatttgctggtcacctcctaaaggaccagatttcaggattgtgatatcccatttgatttcaggatgtttttcttcaagggcttttttaattagtgtaccggttgtacccgtacaatagaatttatgtcctatcagacgttccgagttccagagaacccactctatcatgtcttttttcattgcatcgtgtgcaacaagtccaattctacgaacaattgtttccataaagctaaattattttatttttatatgataattataataacaaaaaaactaattctattgaaggccggaggatgaccggataaatctgagcaattctttgtttgcctggctatccatgacggtttcccgtttttcttcaaaaagattgagtgttgtggagcattccccacagatgtcaatgcctactacctgttctttctgaagaataacagccagcagtttctccaattcccataagctgagagaaccttgatcccagtttgttgctgccgaagccggcttcaagacatccttgtctatggaaatgtaaaccggtccgttgatatgtccggaagaaaagttctgccaaccctcttcgtgcatgagcgtagtttcactgtaaaaccgaacttgtctttcatatcctttcggcacagcctgtatcagtttgtctgaagaacctacgataattactttcttgcagttgttgttatggtccaatatatcctttacccaacttccgcaagaaagtatgttgtcaaacaacggtggctgcatatcgggatggtggtcgaacacaatcagcgaaaacggagtttcaagtttgtctgtccagaatttagtcaaataatgataattgcctgaatcgatgaaatggactccctccgccggataatcagcaatcatccccttcaaagccaaagccccctccctgtcacagtagccatctgtaccataaagatgacgacaatccagccatataaatttattgttccgggcaaacgcctcgtagtcatacactcccgtgaagttcatgatgatgatcggccatgctatccgtttatctgttttttgattttgcccgctcatacgttgtttttgcatatccttttactgttcattaaaaccatcgtacataacagaaatcttgtcggtgaggtaacaaagcattcttgggatacatacggaaggcctgcttgaagcttccagcgttgaaaatgccggatgtcgccttaaaggtatataaattcccattcttggaaaccggcaaaaggggaataacctcatatatgtgatcctgaccgtcttcacgcctgataatgaccgattctattccgattgcgtcatccaggcctttctcatcaacgacaaccgtcacctcatattcctttccggcttcaaccgtggcattcagcccattccctgcctctatggatttgatttctatggcatcccatctgcttcggacgtttgctttccagtcagccatcattttcgccttcgcaaagttgtcggctgccagaatgtggaaatgctctgacagtttgttatagaacctgtcatagtagtcgtccaactgtcttttcatggtaaaatggggagcgatttgtgcgattgagttcttgatatacttgacccagtcttccgaatagttcttccccccatgctcgtaatacagtggcaggatgtcatgctccaacaaataatagatggcttcggcatccagctggttttggtactgttcattctgataagtccttttatcagtcagtgcccatccagcatccttacggtatccttcataccaccaaccgtccagcacggagaaattaagcacaccgttcatcaatgccttctcgcccgacgtacccgaagcttctgccaaccgcgtaggggtgttcatccaaatatccacccccgagataagatggcgtgccaggtccatgtcgtaattctccaagaatatgattttacctaaaaattccggacgccgggatatttccacgatttgcttgatcagcccctgcccggcaccgtcattgggatgggctttgcctgcaaagatgaactgtaccggatatttcggattattcacaatcctggcaagtcggtctatatccgtgaacagaagatgagccctcttatatgtagcaaaacggcgtccgaagcctattagaagagcatcgggattgaatctctcaaaaatggaaacgctcaatgccggatcaatctgactcctgagccagtccttgctgcatttgcttttgatatagtccagcaattttgctttctgttttaaccgggtattccatatctcttcatccgggatgccatagacggcctcccagattttctgattggactggtcgcagaaaaaattctcatcaaaattgtccttgaaaagctttttccattctgccgcacaccaggtaggcagatgtaccccgttggttacataacccacatggttctcttccgggaagtatcccttccagatcggcgcaaacatttgctgggataccgatttatgcaacttgctgacaccgtttacctcctggcaggtcttgcaggcgaagacagacatgcagaaacgttcctccttgtctcccggattgtgacgcccgagatccatcaggttatcccaggttatacccaacttgccaggatatcccttcatatatttattgaaaagcccttcgtcaaaataatcatgaccagcgggtacgggagtatgtacggtataaagtgaggaagcacgtaccagctccatggcctgcccgaaattcaagccgccatttatgtaatcacaaagccgctggatattgatcagtgcggcatgcccctcattacagtgatatacatctttcgttatacctaaagctctcagcgttatcatcccgcctatgccaagcagtatttcctgttttagccgattctcccagtcgcctccatacagatggtgagtgatagggcggtcaaactcgctgttgagttcattgtccgtatccagcagataaaggggaatacgccccacactggctttccagacattggcatgtaccacaaaactgtcggcataggggacgtggattaccagttgtttcccatccggttgcattaccttttcaatcgggagctgcccgaaattctgcgctttataattgactgtctgctggccgtccatggaaagcgactggtcaaaataaccgtaacggtacaaaagtcctatggcacaaaggtccacattgctgtccgacgcctctttcaggtaatcccccgccaacattcccaaaccgccggaatatatcttaaggacttcatccaagccgtattccatgctgaaataagctattgacgggcgctggtgatccggttccacatctacgtattttttgaaggcggaatagacggcatccattttatagacaaagttctcatcatgtgccagcgctacaagcttctcataatttatccgctccagaaacaataccggattctgttccacctctttccaaagttccgaatccaaatcacaatacagtttctttgcgtcatcattccatgtccaccagagattatgtgcgatttctgcaagttttcgcagttctgcaggaagatgtgaacctactgtaatctccctccactgaggggtatttacattataacttgaatattccatgacattttaattaaataagtcctaatctttattcagtccttttattatttttcgtttaccgacaatccataccgtatcattctccttgaaaattgtatcagggtctggattcataatattcacggtactcctctctattccgataatgatgctatccgatatgtctgcctcccggatcgtctttccgatcaatggtgaacctccttcgacaggaaattgccctatttccatctcatcctgcgaggatgttccgttcccgttcctttctaccttcttttgctccatggatgtccggaagctttccaactgtcggtccgtacctacgaccgtaaccttgtcatatggatagagatgttcttccccttgtggtatatccaggcgtttttctccacgggtgattgaaatcacatttatctgaaacaaggtgcgcaagctgctttcttttaatgttctgcccacatatatggaatcaggggatactgtgaaatccgccaaatgtaattccttgaacgggatattgctgccaagggtggagcctgtatcactttctgtagaaagtacattcccgtccgtcccctgaaagtttgccataaattgtctctctatagtcagcgaccgtttcttgatccgcttggaaaaataaatgacggcaatgataatggaagagactaccaacccggctcccaaggcaacattgaaaagatgggtaatgatactcatcatgataatcgtgcagatcagtattttgacaagtactattgataccaaaggccctctgttgaacttgttgtccgtccagagtttacggaactcggttgaattgttccttttcatgatgatggcccatagaaacggggatatgacaagaaagatgatgatgaagcccaacaagttcccttccattcccggcagacttttcctaatcaaaggatgcacataggaaaaatataaagtgatgaaaaaaacgcatacgaccagatagagtgtgacagacaccagcatagaccggatcagtttatgccaagtaccctggtgttttacagtcattgccccggacgtatagtgtacgagataatctttcagggattcaggcatgtggatgtctataaaccggtatgctggttccgaaagccgtatcatatagggggtaagaaaagtcgttatgacagatactgccactatgaccggatagagatacttgtccgtaacattcagactgacgcctaaagatgcgatgatgaatgcgaattcaccgacctgtgtcagtgaaaagccggactgtatggcaattttcaacggctggccggaaagcaagacaccaaagctcccgaacagtacctgaccggacagtaccagcaatgtcaggatgagaatagggacggcatattcccacatcatggcaggatcgatcatcattcctaccgacacgaaaaatatggaagcgaacaggtcttttaccggctgtacgatatgtacgattttttccgcttcaacggtctctgccagcagggaccccatgacaaaggctcccaatgcggcagaaaatcccgcttttgtcgcaatcatcaccattcccaggcaaagtcccagagaggttatcaataaaatctcgttgctggtgaaacggcgtatcttcttcagcagggtaggtatcagatagatacccaatgccgaccagaaaatcaggaaagcggccagcttcaatatactttccagcatctccttcccttcaaaatgtttgcctaccgccaacgtggaaagaacaaccatcatcactacagccaccagatcttcgataacaagaatccccaagacaatgccagtgaatttctgttggagaagtcccatgtcattgaaggccttgaatacgatggccgtggacgacatggacaacattccacccagaaaaatactgctcatgtgggagaaccccattgcattccccgctgtataacctatgaacatcatgccacatacaatagtgacagtggcaacgatagccgtaatgcccacatttatcaatttcttgaacgaaaagtccagtcccatcgcgaacagcagaaaaatgacaccgatgtccgcccatattttgatattggcaggatcggaaacagtcgggaccagagaaacggaaggacccgccataataccggctacaatgtagcccaatatgaccggttgcttcagccacttgaaaatgacggttacaataccggcaataatcagaattatggcaagatccgatattaaaggagcaacttctgacatattaacggttattttagatcgataattcgttaaggacccggatcaggcttttgtcaataggcttgtcctttttgattgcctggacaaaaggaacataaacaatctcgttgttccgtatgcctatcataacatttcgctggccttccattaaggcctggattgcggcttcacccagccggcttgccagtatacggtcattggcactcggagcaccaccccgttgcagatggcccaggatagaaaccctgacatcatacccgggatattccttctttacccggtcggcgtaatatatggcacctccattcttgttttcaggactttcggtcacaattacgatgctgctgtttttcgtctttctgaatccgcgcccgatgaatgtttccaactggtccacgtccgtcctgtcctccgggatgatggccgcttcagcaccggaagctattgcgctgttttgtgccaggaagcccgcatcacgccccatcacttcgacaaagaagatacggtcatgggaggttgccgtgtccctgattttatccacgcattccacaatggtgttcaatgccgtatcatatcctatggtaaaatcggtaccatataggtcattgtcaatggtgccgggcaatcctatgcacgtcacatcatactcctccgcaaagatacgggctcccgtcagggaaccgtctccaccgataattatcaaagcattgatgttctctttctgtatgaccttataagctttcttgcgtccttcgggagtggtgaaagtctcggagcgagctgttttcagtatggtgcctcccctctggataatgctacttacatcttccgtcgtgagttctttcacttcaccggcaatcagcccctcgtaacctctataaattcctttcactttaaatccgttaaaaatggcggcgcgggtcacggcacggatagccgcgttcattcctgaagcatcccctccggaagtcagaattccaatatacttgttatccataatttgttttttatattttaattaatcaggcaaaattagaaagcaactgttttagcctttttctgctataaaagatacggctttttatcgtactcagtgacactcctatctttgcggctatttcccgatatttgactccggtacaacataaaaacgacataatgtgctttaggcaatgttttaagggcttcccttatctcttttgcatcatgcccgttatccacgaaaatgaaagagtcgtcccttaacaggaaatgatattcaggttctgataatacatataaattccctcgtattttctttgtccggcaattattgataaatgcattgcgcatgatggtatacatccagcctttaaaattcgtaccggaatcaaacttatccttattatccaacgtcctcaacattgtttcctgcaacaagtcttctgcttcatccttgtcagcagtcagtttatatgcaaaacaatgcagttcattctgaagggctaccagcgctttatcgaaatcaaatcctctcattatatttattttggaattcaaatatccgggtgaaggcattccctgataataagaaatgccttctgtagagtctcatcaagatatcttatttgacatcaatagttttggtggtttcctgaaccttcttatctacgactttgggaatatcgataaacaggaccccgtgttccactttggccgaaattttatctttttccacattatccggcagcaggatactctgctggaatcgggaataggagaattcacggcgcaagtattttccgtctttcttctcctcctttttctcgtcctttttttccatgcagattaccagattgttgctttcatccacacttaccttaaaatcattcttggtcattcccggagctgccagttctaccttgtagtccttttcattctcaatcacattgatggctggagccgtagcgtttgctcttgccatccattcattgtcaaagaaatcgttaaaaatactcggtaaccaattctggtttgtttttacaggtaccatttttacctcctctttaaaagttaataattaaaacttaaaaaaaagcatctgcttgatagacagatttttattttttagccatcccttgtttggccacagcttctgcccgtttccgtatctcttccgggtttccaaggtagtagtccttgacaagaaccagcctgtcgtcaaattcaaagacataaggaactgccgtaggcaggttcaggttggaaatatccgtatcggaaattcctttgagatgcttgatgattccgcgcaggctgttaccatgggcgactaccagcaggctgtccttatacatcaatgcgggaaagatgatgcatttccagtaaggcatgacacgcccaatagtatctttcagggattccgtacggggaagttcgctatctggtacaccggcatagcggatatccatgcccggattacggggatcatctttgcctaccggagcgggagccacgtcatagcttcttcgccagatgtgtacttgttcttcaccatattggaccgctgtttcactcttattcagtccctgaagcatgccgtaatgcttctcgttcagccgccaggtcttttcaaccggaatccagtctttatccagccggtccaagacacagttcaacgtttttacggcacgtttcaagtaagaagtgtaagctgcctcaaaagaaaatccagcctcccgtaatgcatcgcctgccttgcaggcttcttcaactcctttctcgcttaaatccacgtccgtccatccagtaaaacggttttctttgttccatagactttcgccatgacgtaataacactattcttttcatggatacttcttctttatgcaatggttattgaagaatccagatatacgtcctgaatggtgttcagaagttgaattccgtctttcatcggtttctggaaagccttacgaccgctgatcagccccataccacctgcacgcttatttactactgccgttacgacagcatcatgcaggtcggattccccatgggattcaccgcccgagttaatcaatccgacacgtcccatatagccattcgccacctgataacggcaaaggtctatcggatggtcagtggtcagttccgaatacatacactcgtttgtctttccgaatccgatagccttgaaaccgccgttattggatgggagcttctgcttcacgatatcggctttaatggtaaccccgatatggttggcttgtcctgtcaagtcggcagcggcatgatagtcggtaccatcctttttgaagctgctgtttctcaaatagcaccacagaatagtagccattcccagttcgtgggcatattcaaaagcctgtgacacttccactatctggcggcggctttgttccgaaccgaaataaatggtagcaccgacagctacggctcccatgttccatgcctctttcaccgtaccgaacattacctggtcgtagctgttcggataagtcagcaactcattatggttcagcttgacgataaaaggtatcttgtgtgcatatttgcgtgccacggcgcccaacacaccgaatgtggatgccacggcattacaccctccttcaatggccagctttatgatgttttcgggatcgaaataaagcggattgggggcgaaagacgctcctgcagaatgttctatgccctggtctacaggcagaatggatacatagcccgtattggccagacgtccatgtccgtataaagcctgcaaactttccaatgtacggatattcctgtcggaattcatccataccttatctatcatatccggtcccggaatatggataagttgtttgtctatcgtcttacatgtatggttcaggtagtactcagcctttcctcccaataaatctactattttcattttatttatttttattgattattctggtttatgactcccgttcacccagttttgcatccataaaaaggatagcacagtctccggctttcctcagatgactaacaatattgagtacattcgcttcatcttctacttgctcacgaacaaattgccacaagaagtcctgagtggcattgtctttctcttcggatgctacctgtaccaactcatcaatcagtttggaaacatgtttttcatgctccaaagcatgctcgaatacttcaacagggttaccccaaccttgtggaaccacatcgaccttgtctactttcggggttgcctcacgcttaatcatgtacccggcaatggcatatgcatgcccggtctcttctgcagactgtttctgcatccagcgagccattccggaaaagccctctctttccagataaaaagacattgataaatacaggttggcagaccataattctgctgtgatttgctcattcagagcattttgcaatttttcagtcatgatgaatcaaacttttaatgttaataataaatccaaattatctctcttctttaagaacaagcatgggcttgtttcaagatttcaattaataccggacgtatcccgctgataaaacattccacggcgatcaccattagaataagtcccatcagtctcatcatcacattgtttcccgtctctcccaagatttttaaaagctgggtggacgcgcacagaataaagaaggaaagaatgcagaccaaagcgattacgccaagcaatactattttgaaagtatattccgaagcatcttccatcaatgttattccactggaaatcgctcccggaccgcataacatcggaatggcaagaggtgtgatggttatatctttggaatattcttttcgttcagtttcattcagtttcacatgggtaaaatgtgcctgcaacatatcatatccgattttaaagatgatgatacctcccacaatccggaatccgtttgttgagatgccgaaaaaatgaaacagaaacctgcccgataatgtaaaaaggactaatatgataaatgcaatggtacatgctttcaaggcgatatatctgcgttctttcgtatccattccatcagtcatttgcaggaataccggcatcactccaagagggtccatcaaggtgaatagcgaagtgaaacacaatgttaaatatacaaatatatccatgatgacatatagtttattatcgattattatatcgcaaaaaacataccagatagcattctgcaatattaaattttgcataacatcaatcttaaatccataccgtcaaaaataaggtagtttccgttcgttttccttggcgaggatacgtaacaattccataaatgccgtacttacatatatacggtctgcatacagcccgctgatgaaagaatggaaggacatgcttacattccagcataatatgagaaatgtgtttacctgacgtgatatgtactgctcatgttcaagcaattcattcaaggcattcaatggcgttgtccattcatgtgtatcccgtttcatttcattgattacaacacatcctccatcatggcatatccgattcatcatctgataaaccttgttcatattgtcctgtgcttgggagttcagccaggagctaagtattggaagccattcatcttcaaaataaacctgcaatgacaggtataaaccggttgaccatatttctgtattgatcaactcattcatggcgttttctattcgtttatccattatcactctgaatattgaaaatccattactaatatcatgtgttattctcagtatataaaaattccattcgattgtgggtaacccataaaacggaattcttaaacgaggcttaaataataggataacttatcggcgtagacaaattgtcataaaaaatagcactatgatgtctttttgtcttgcctcccttgcagaatatccaataagacatccagttctctttctattccttcaatcttatcggaaatacagtccaaagtattatggtgcagactagctttacactcctgcaactctcttgacagagaaagtatctgtaaccaaagttcttcctctatgtgatagggggagttactattatctagtaccatagcaggagaaggcagaaaagtgctttggcatgtaatttgtatgataatgaacggtatgttccgaaagagacaggaatggaaatgaaaggatagaatattccacaaaagacagtaacaaacaaagggggaaagtcgttggagacagttgtctcgcttttaaaacaagttgctttcataatgtttattataagccaaccctgttccctggagttgtgtttatataaagttaagcgtgggaactttggtattaccgttcagaagtatccccatactcaacaacatataatacacaaagccccacgcctatatataacaaaaatctatatagatagaacgtggagcgtccaatgtattatccaattgttgtttcgaaattggggatttcctgaacttggataatgccttaacgctttactataaatcttctattttcaaaagactaatacaaatgtaataaaagaaatgaattctttgaaaggaaatatctcttttttttaaggggtggcttaatttttctttatttaaagtcttagaattactgcccaccaaagcccgtcacgaatgttttgaaatcctcaagctgtacattaagctctatatagtatagcagaatagcagaaaaacagaccatgataccgcaggtatataggtcataacccactcttccgtaagtatcttatctatttgacaataataaaaatgtaaaggaggataatgacatggacaatattcgtatcccaatacatataggttaacatataagggagaatggtcacggagtccacaaaccatagaatgaaaaaatatatttccatcgtgtacggtttatgtctctatccggatatttgaccggtgccgcaaatgcgcaatgcatactccacaaaaaaacaccagggaggaaaaataagtcatactgaataacgcctgtctgtaatgggccatggatacaaatgaactacagataatagctgcaatagatataacgatacaagcacaaaataatgtacgaacgtgtccatcagttgcatttggatgaaacagtaccactttatgcaatgtttggttagattgagtctgaacataggaccttaaaaattagacggatataaatttactaaaaatctgtggaaaagaggaatagaaaggcggaaatgtttttaaaacggctatgaataaagcgtttgtgaggacaaatgaggacaaaggcataaaacgaggtaacgcaaaaaaaagtaaatttatgaagtagaaaggttgctaaatcattaccccgtgaaaggtggtttttgatactccgtgctgaatttttctccgtatggcttcggttggtttacaaggcataactcattgatacttaattttaaacttaaaaaacgagtatggcaagaagtacattcaaagtgctgttctacgtgaacggcaacaaggagaaaaacgatattgtccgcatcataggacgggtaacgattaacgggattgtgacgcagttcagctataagtagagtatcccgaaaacgctttgggacgtgaaagggaacagggcgaaaggcaagagtgcggaagtacgtgatatcaaccttgcccttgacaacatcaaggctcaaatcatcaagcactacctgcgtatattcgaccgtgaagcgttcgtgacggctgaaatggtgagcaatgcttatcagggtatcggcagtgagtatgagacactgctcaaagcgtccggacgtgagaacgaagtattcaagaagcgtgtcggaaaagacagggtaatggcaaccaccgttcacgggtggtggcaagaaaccatgtggcagcgttcatcaagtctttttacagacggacggatatgttcatgctggagattaagcccgacttcatcaaggggtttgcagcctacctatcaacgaaagcgggacttcacaacgggacgatatgggaaaaatgcatgtggctgaaaggcgttgtcatgtgtgtgcactttaacggactaataccgaaaaaaacgtttgcccaattccacatcagccctaatgtgacggaacgtgagttcctgacggaagatgaactgaaaacgttgatgacgcacgagttggggatgtccaactgttctatattcgtgacatttttgttttcgccagcttcactgccctctctttcgtggacatcaaggaactaaccaatagcaacatcgtagaagtgaatggtgagaagtggatattgtccaaacggtacaagacaaaagtgccgttccaagtgaaactgttggatactcctttgcagattatcgagcgttaccgaccctgtcaggaagacaatctcatattccctaatctacattctcaatgcgcatgaccaggtctacggccctgccatgagtgccctcgccgaaatcataccagcggttttcctctttgaaaaccttgaaactcggcgagctgtcacgccggaaaggcgaactgtacatgtcatatcccccgaagtgccgggaaggattatgcccgtaataggagagaatatcttccaacggtatcgaattggcttcctgtgatgtcatgacttgttatgtttgattgttcctaaaattcattctctatgccgacatgggtacggcctggcgcatacggttcaggataaaccttgtggggcttttaattctcctgttgccccaggtttccttcaggacggaagccagtaccacaggtgcgacggcggcaagctgcatgatctcctgctggtctcttgcggctatccccagaagatcgagggtcttgcgcatggagcgcatcgtctcagcctgtttcctttcacggtccgcctgtccgtattcggcattgtacttggcgatatagttgtttatcaggggttccagataattgaacgtggtaagctggaaatggctctgctcaatctcccggatagctgtctcgactggaaaatccggataatatcctctcaggaaatgtacccaccggatattgttctcggatacgcccatgcttttgagcttccttgaaagaaaattctcctcatccgaatttcccgaaggaatgtttgaggggtttggggaggatatgttttctttgtttttattttgtggtttattttcgcgaagtatttcagctttttcgcgaagaacctcatgtgatactcctgaagccggtaacggatgggtatagggagattccggtcgggaagccttctttttttcggataagactgaaacgttggcttccatagtggatgcccgctcttccgggacaggatatgatgcgggcactgtttcctgcaaattttccggtgaataaagaagaagttctccgggaatggcaggcctgcggtgaatggctttacagataccggtatacagttcctgtatgtatttgctggtaaggatttgtttctcttgccagagccttttgtcgaacagtcccaggtctgtacaataatcgatgatggcggcaatacggcactcatccatgcgggaatagtccgctatatcgaacaggccgtcggcatccatcaccatgtagcatccttccacacgaaagatctcattcacgatgaaatgaaaaacgccccagccttccattccgaatttgttctttagccgcttgactttcggatcataaaaatggtcggtttcaaatctgaaataggtgaaacctttttttgctgtttttggcataagcttatttatttaaagtggataatagtcttatgaatcaactgaccgcaagctccagctcttcggatatgttgggaagctgggaaagcatgcagcaggtctttagatagttctgctgtatgtcctccgaagtaagtacccggtacttcctgtacagtccgccattgaacaggccgacttgtatgcaacccttcacaatccgggtaacatcttccaaagaagtattccagtaggaagcggttttccgggctgtctcctcacaccagggaaggaaatagtccccttgatggagagcctcgtttacaagataccggtagatgctgtatcctccgaaaccgtacttacgcatgagccgtctgattttcatgtctgaaaattgcgaagtgcttatctcataacagggacgtgtagtgcactttccttgcagcgtcttggaaagggaatggtttgttccgtctgtaaagctttgggtattcatatatgataatgtataatattgttgtgttaaaggataggtacatgaaaatccggattccgccataaacggcggaacctgcttatcgtgtcgaaagaatatggtatttcttccgaatgaattgcacgtaattatgcacagtcttttcgcagacttttggaaaggccggatgatgttccttcaaatagtcatggacacgactgctggaaatggaaggaaaacagttgagaagggataagacttcctgctcataggcatgaagtttgcatggacgtatgctccggcatttctggaaaagttcttctgaactcaaatgctgaagatgtctgacagtatcacgagagatgccaagacgttgcgccgtccttgttatgttaagacctcgcgaacggagatcatgaacattattccataatgtgtacttttttgttaaatttgccgcatccataatctattagatagacttcgtaactgggacattccagattacgaatgtttgatgcagctaagttaccgcccgcatgctttagatagcataacatttttatagaaaagagaactaaatcaacccacatttcaaaagaatctgtataaattcaaaatcttatcagctaaatctcaataaaactttgcttttacaaaaattctcctcggctgatattacttataatatattataattggtaataagtatcgttagccataatgattgcatcttctaaagtaccgccattttgttctacaaatacgataatggcatctataaactcggtgaaagaagcaacatcttcacctgctattttttcattataatcttcctcggtgaagtctaaactttctattaactcagttttcatatctactcaatgattattatagtatcattattaatgcctttttttgcaaaaataatatattgccatgacttcttagctattatttgcaaataatatttaccattacaatatattataacaggcgtatttgttatcgagattttacctctgatagctgcaatatgaatatgattcaactcgttacagcttattcaattcactattaataattgtctatgtttttctaaatcttttttttatcaaaccgataccaacgattagataagttttttttattttggtatttcttctctcttcataaaagacaattctaataatattttcaaccaaattaataattaacttctattttcaaacaggatatacacattactaaacgacactcagtgataagcttattatatttgtagcactaaaccaaatacttaatatgatgatattcaaaagtcatttttacatttatgctttcctatcctctatcattatgttgattggatgtacagataatgatatgcccataaaagataaagaagaagaaaaaccacctatcacagatgaagaaaacccgtccttgccgccaaatgaaaatacagaagtagccctattcaatattcttaatctaaactatcccggattgggtactgttaaatcgctgcatgaagctggtgatgatactactgctttaaaagaactgttagcttactacagaaacagaaaaaacataaagaatcccaatgtcacatcagaccctcccagtgatgtagagcgtggttatgcagactatgccatagatgaatatcgtttctatgtaaacgaaaattatttggaagataagattttgaagaagccttattcactacaaaacagcgataaaacaataaattggaaatttacacctaaaggtgcagataatgaatatcaaaagcaattacatcgccacaattggatgccgcttcaaggaaaatcctatcaagagtctcatgatgagaaatatatgctttcatggaaagaagtgtataccgattggattgccaagcaccctctacccgaaggtagccctgacaagttcaaatggtatcaacttcaagtatccacacgtattatgggacaaacggagttattcgaatattttaaaagttctcctaactttacatcggaatggctttcttttttcttgatacattttgcggagcatgccgattatttatctcaatacaaatatgccggtggaaataatatcttgttaagccaagctgtagcattagtgtttgcaggaactttatttccagagctgaagaatgcctcgcaatggcaaaaaacaggttgtgatatcattaatgaccaaacttcaaagttatttttggatgatggtatgacaaatgatttgtctttgcattatcatataggtatattagatggactatacgatctcaaacggctgctccttcagaatgaagttccggagaatttgctgtcgccaaatctaaatgaggtacttttaaaagccgccaaagtagtgatgcatttcacctaccccagttattttacaaaaaacagcaaagattgtactcctgctttcaatgattcatgggttaaaacccgaagtgtgctaaataaaaactttaagaaatatatggaaatgtttcctgaagattccgagtttgaatatatgtccacgtatggtaaaagtggcacttgtccgagtacacaaataaaaacattcccttcttctggtttttatgtactacgtagtggttgggacccgcaatctacagtgctgattcacagtaataatgtttctttaaaattgggagactcaagccataaccaacttgataacggtacatttgagttatatcgtaacggacgtaacttctttcccgattccggtgtttgtgcatatatggcagaggataatgagaaggttatggaactacgcagatggtttcgtcagaccaaagcacataacacaatggttttaggcaaaaccgcagaccatgaagaaaccggaacggaaaatatcaataaagccgccggtactttattattatttgaggaaaaagatgaatatcaacttattgtgatagaaaatcaaggatatagcaacttcaagcatcgtcgatccatcttctacgtcaaacagccacaggatttttttgtgctggtagatgaaggattcgggactgctaccggatatgcaaaattatatttccatctttgtgatggaaagtctgttgataatgttcttctggataaggaagaatttggtgcgcataccacctttgatgatagcaataacctgttaattcgtacattcggagaggcgagcaggaatcttatctttaaagagtttgatggtcggatatcctaccaaacagacaggaaatatgaacacagaaagtcctatgcagttgtcatgcggaaaccggacaataatcctgtacgatatattacggtactatatcctgtagactcagtcacaggtcctgtaatcaagggacagtttgtcaatacaggtaatgaagataaggtatctgtcaatgttacaattaacaagaaactatacaatttaagctatagccttaataaaagaaagtaatcttgtttaaatcttataacagagataattatagcctctctacttataatcccagcggtagtttacagagataccaaagcacaaacaaagcagtccaggcaataagaataaccaatgaatacctccacgtatatttaagcaacgaaccataggtagactgcttatcatattgctgcatatacgtcagaacaagcggcatataaaacataaaaggagtaatcgcattcgttgcactgtcaccgatacgatatgcacacagtgccatatccggagaaatccccatacccgccaataccggaacgaaaatgaacgacataaacgcccacttcgatgtggaagaaaccataatgaggttaataagagcagtaaacaagataaataatatcaatatccacaaactatccgaacgaacgggggaaagcacattcgctcccattattgcgatacatttatccaaatgggaatactcaaaacaagcaaacatctgggaagcaaaaaaagcgattacgaaataaacacccaataacctcatcggttgggtcagcccctctatcacatcactgtccgtacgataacgtccggaaacgaatccatacaccattcccattaaacctatccccaaagataacaagaacagaataccaataataaacggcgaacggatcaatccgccattaacacctctcaatataccccatgaagagaatgtagcccatagaacaaacgccgcatagagcaagccgacaatgacagctccccacaaagctctctgctcctttcgagacagttgcttataaccgcagaaggtattactcccattgtattctcctaatcccggcaatagttttctacaagttatatggtaaataatgaataccaacaagaaagtggatacacaaaagaaataataattgcacagaggtccgatccgtccacccaacacatccgtcatatcggcagcctcctgtgttgtggcagcaagcataggatcgagtgtgcttaaaaggatattggcactataaccgcacgacaccgatacataagcagctatgattccgcctatgggatgtaatcctaccgaatggaataacgttgcagcgataggcagcaatatgatgtatccggcatcacccactacattggacagtagtcccagaacaataacactgagtatgatacgccacggattacgtacccgtctgcgtatgcccttgcgtatacacgcatctataaacccggaatgttgtgcaacccctatcccgaacatcgccacgataaccagccccaacggggcaaaacccgtaaaattcgttactacatgacgcagcagccatcgaatgccttccgggctcaataaactctgtacacgtatctcttcgcctgtatgaggcagacgcacactcaaaccgtagacatcaaatatccacgacagaaagataactcccagtgtcagcaggaagaacatcgttgcgggatggggcattcgccatttattcctcataattactcggtattcggaattattcctcgtccgcttccagattgtcaatatcaagaatacgcagttccagtgcacgcaccacaaggcgcgtagcatttactcccactcgttcgcactctccaaaaaggcgccctatcaaatcattctgccgtttctccaaagatttcacgccaaacggcattcctttcaggttggcaatcatttcctttgtgtaccccaaagcaagatgacggagaaaacgttcgtcatattcgtctatgtcataactgataacagcttcctgccgtttcgtatcatttcggacggaagttttaaaacgttctacaatcttttccaatattggataattgaaaacaagttttttcccatccataacagcttgtacgtctgtcttggtcaacaattctccagtcttcagaataataccatcagctcccgcttcaaggacatccacccataatttttcgtttaaaatctctccggtgaatatcaacacatgtacatccggatagcgcttaaatatattgcggcaaatatccacaccgatagtagtggagccacccaaacccaaatccagtaaaacaaggtccggcacaccgacttccatcaaactccagaattcttgttccgtcatggcggtaccgataacttccgcatccggtatttcgtgacggaatatctcttccgttccttttaattccagctttacgtcctctacaataatgactttaaacttcttagcttccatatttcatatcttttcatccttacttattttaatttgctccgagaaaagcctttatcttcccagctgaattctctttagataacgaggcagcgtaaagtatacggcaaatccccctttctctgcaggttctgcattaatgcggcatcctcttcttccggcaaattcgtcatggtcgcgaataatctgtttgcataacaagtactccgtaccacacaactttcccttttcaccggccgtcatacgtgccagattcgggtaaaacagttgattcaactcttcccttgttttctcccgccgcatatctgtaaaaagaaaacgcacaaaatcatcttctactgcacaagtcaggcgaatttttcccgcaaccggcacagacaaagcttcatcaatcaaattctccaacaaaaaatgcaattgatttacatctccgataaccgattcacttactgtttctatactgaaaacaacagaagctgcaactcccctgctcaccttacggaaatacttctccgcagcttccaacagctcgggcacaggaatcaccgtacgcctgaaagtaacctcttccaactgacgggatgcacattggctcaaaatgtagaatacccctttataatactctatcaattcgctgatagccgctaccgtttcccgctcctctgtttccaacagtttaccggagcgaagtttgcctatcaattgctttattctatttggataataaatcgtttcatgtttgatggtagacaaacagttatcaagcaccatattctgcacatgtagcaaactgtcctcccacgacgcacgacgtgcttcatcctgagcagtctcaatatcccggtatttcattgccagcttcactaccgcattgaatatcacaatagcaatgtaacgggctatcaactccagcaataaacggtcggattcctgctgcatcctgcttctcaccaaacacaacactcctatacactgagtggagtttccggctttcacaatgagaggcaatgcctgcattccattttccgacagatacctctgttcttcaaaacagcgttgcatcaactcttcccacacaagtttgttctctgctactccttccagaggattcgacgcgtactccaacctatgggcagcctcgttataaaccgcaatgctcaaccgctctatactcaacaactcattaaccgcatcgaatgcattatctgcgatttgttgcggaatatctttcaacatatcttcttcatgttttagcatctcctcgtcttcggatgcagatattacagatgcggtaaacacctgcttgttgatttccaatacttgctccaagttccaacggtttaccaatctcctgcggaaatacagaacataataccccaagcatagcgtaaccaataaaataatcaccaacaagatactcaccgtcttattattcgtagaacgctccagttcgcggcagaaatcttccaaagactggtcctcacccagcaacttgtacaaagtagtataagcagcattattatagccatactcatcccactgtttcaaagcaagaaatgcaaccgccgcctcattcctaatgtccagaatcacatgaaaatcggaattaaacatctcattccaccagtccagctcagcaggtatgtcatccccgaccaaagtcatataacgatgcggttcttcggcatacttcccgtaatgttcattcaggcaaaccattgcggagtctatatattgcaaagccagcgcatattcaccgtctacattacagtaataggcttcattggcataatcggaagccttattcagtaaaagttcatattctgcctgcaaggccaatgtcagagagtcagtaagtgtttctttcagcacatcgttatcagctgccttgctgcaagaaaccatacctaaagaaaacacaagtagtatcacggtcaaaaccttacgtactcctgccggcagtctgaagtagaaacggctcccctgccctaacgtactcttcacattgaacaggcacacattaaaaacaggattcgttttcttatatttctcaataatgcccttacaattcattaagccgaagccgttgcccttatttttccgcaatgcctcccggtcgggtgcatcattcatgccgataattttggaatcatacaccttctcgcctatgatatggttaacatcttccggagacagaccgcatccgttatcctcaacggatatttccacaaaatcattctcctgccgggcatagattctcaccttaccccccttgggagtgtacttacgtgcattttctgccaatgtatttatcataaagagagtcaatgccctgtctgccttcacacaagcatcggtaggctctacttccaaatccagctgtttcatttcaaaagcccggctccctttcctcaacaattcaaaaagctcattcagttcaaaaacttcgatgctcagactcagtgtaccttgcttcatcttaatccacaaagccagaatatcattatactcgttaatggtggtaacaagctcatcaatatactgatacttttcttttttgatagtttcatcatggatatatcccatgcgtatcagtttatgcacctcgttcagaatgcggtcgatgtaaggatgaataccatcaacaatagaaaggcaagccttcttaatcagattctgtcgtttgtttccggcaatatgccgttcatgaatatagcgttgtttctccagtctgcgctgttcctcgccaagggaaatggaagtcattccgttgtctaacgcccattggatataaggattgattacttgcaccatagcctgttcatctttcctcatatgccgtgcgaatatcaattccctattcttgatacatacgtcttctgttccgaataagcatttcattttgggacgtacagccaccagaatcgcatccgtgatgtctttctcggtctgtgcatcggcgggaatggatacagttatctcctgacaaatatccagcatagattgcaaacggtgcagatgcaatctgttgcgctgtttagaacgtttattaaagaaccagaagaacaccactactacaataagccccgtaatcacacagaaaagcaacagattaagctgtcccgcctctctttccaatgcttgataacgactttccaattccttatcctgacgggtatcttccagaatatccagatatatattcctgttataatccgaatactctttcatttccagtccggcataagtgacactcaactgctcacgtatccttgaaatccattcgggaacggtttttaatttctgccgaatccaggatttctccgcacatatcgtatcacgacggtcgtaagccttcaaccaatccagactgtcgtggcaatcgtaaaaacggcgatgatgatcgtttacacactctaaggcacgtttcagagtatcgagtgcctgctcatattctccatgcgcattcaaatatttcccgatagaaacgtatgcacccgcaatttggtaaatgtcattatactgccggaatttctccaaagcctgttgtcccaaccgcataggcagtaaagaatccaccggctcgccgaattgtttcaacgcatgcgtccgtcgtccttgataaaaatcataattatccggagaagccatcaaattagccaacccctgtataccgtttccttcaaaatacagaaaccctttcctggaagctaatttccaagtagtgtaaagttcatcaaactcccttaaacgacgctcatcgggcgtttctccttcgcacaaagaagccgacccttttatatagtgataatacaataactgatttgtgtctgttgccaactcctcattctccggcacctcattgatagatgccaaagcttccggccgttgctgcaaataatagtaatatatggcagacacaatataaaactccgaccgagcataggccagccgcattcgctcatgcctgtctacaaacaaattgttatcttctgcgatgcgtttcatgcggcgtacagcactattgcggtaatcatagaactctttgttcagtgccgtccgctgataaattttcatcaagcctatatcggcaatcagaagttccaattcattctttgtcaggctgtacacttcctgatagtatttctccgcctgttcaaagtccattcgcataaaagcgcagaatcccagattgttacaagcttccgcctttccttgcctgtaaagtttcactccccggtaagcctttgaagccgcatgacacgatgagtccaaatttttataacgataagcatatgccgcctgatttaaggagtcaatcagatgcacctcttttgtaggagctgtacccacgcacgaaacaaatgccgtacctatcaggcatagcattcctattaataatatagatgaaaggtatttcacaaagcaaagctacaaataaatccggtaaagaaaaatattttttctacaataagtcttgtattatgtagcgggaaattcatacctttgcatgcaaattaataaataggtaatatctattacaaaatgagcgaaaaagcaccttttatggtattctcaggaacaaactcgagataccttgcagaaaaaatctgcgccagccttaattgccctctaggaaagatgaatatcacccactttgccgatggtgaattcgctgtttcttatgaagagtctatccgtggcgcaaatgtattcctggttcaatccactttccctaattccgacaatttgatggaacttctgctgatggttgatgcggccaaaagagcatctgccaaaagtgttattgcagtaattccttattttggttgggcacgtcaggacagaaaagacaaaccgcgtgtatccatcggcgccaagttggtagctgacctgctttcagttgcaggcatcgaccgtttgattactatggaccttcatgctgaccaaattcaaggtttcttcaacattccggttgaccatttgtatgcatcggcagtattccttccttatatcgaatcattaaagttggatgaccttgttattgcaactcccgacgtaggcggttcaaaacgtgccagcacattctccaaatacctcggtgtacctttggtattgtgcaacaagacgcgcgaaaaggcaaacgttgttgccaccatgcagattatcggtgacgtaaaagacaagaatgtagtattggtagatgatatagtagataccgcaggtactatcaccaaagcagccaacatcatgatggaagccggtgctaaatccgtacgtgccattgccagtcactgtgtcatgtccgatccggcatcattccgcgtacaggaatcaggcttgactgaaatggtatttacagacagcattccttactccaagaaatgcgataaggttaaacaattaagcattgccgatatgtttgccgaaactatcagaagagtcgtaagcaacgaatctatcagttctcaatatattatttgaaaattgagaattaagaaataaaaataagggctgcgcagtattcgttcagaatcgcgcagccctctctattttttagggacattttaccgtatgtcccttttcattccctgatttcaattactcagccttcccattttataggttcctttccgcaccagctttccatttttatccgtttccacaaacggaccgtctttcttgccttgtttgaagaaaccttcatagcggtttccgttcttatcttcctgcacgccgctcccctcttccagaccatttacaaaaccgcctttgtattttgtaccatcggtaagaatcagagttccctgaccgttgaatttattatctttccattcgccttcgtaggagtcaccgacgttccatttgtaaacgccatagccattgcgctggttgtctttccattgtccgtcatatacagcaccgttcgcccatgtaaacgtaccgtgtccgtcctgcataccgttcttgaagtttcctacatatttattgccgctggcatgatagtaaataccttcaccggtacgttcaccctgcacataagaaccttcgtaacggtcgcccgtatgaaagaagtaaatgcccttgccatgctgcatatcctctttccaatcacccacatacttatcgccattggcatattcaaacgtgcctttaccgtcacgcacatcattcttccattgaccgtcgtatttgcaaccgtcattccagactaacgtgccttcaccgtttttcttatcgtctttccacgaaccgatgtatttggaaccgttcttccaaatgtaagtaccctgaccttcacgcttgtcatttatccaatcgccttcataaaggtctccgttatagtagtacatagtacctttgccatgctggtaatcctgataccacataccgtcataacggttattattcataaaataatagatacctctgccgtgctgttggtcttgaaaccactgaccgtcatacttttcaccgtcgggaaaagtgtaaatgccatacccttcacgctttcctttaacgtactcgccttcatagacatcgccgtttttaaaaaccgtctttccctttccgttgggtttgcgtcctttcatctcaccggtatatacggagccgtccttaaacgtatgtgtccctatttttatttccgacgagaaagttccctttattttatcgaagaagccgcctttttcctgggctgcgacactgccctgtgacaagtataacagaaaaattgcagtatatagatatttcatcttggattacaagttacttaattaggattttgacaaagatacgattaatctgccaaaaccacgaggcggttcccgctttttatgacatttttttgccggatatgacttcttttaatttctctttgcacaaatgctttccggcaagttcgcgtatatcttcaggagtaatatctctgactgcgttcagagcatcttcaaagtgtgtatcgccaaaacccgaaacctgaacgaacatccacgcatctgccagtgagaatgccgattcataactgcggcacatttcgcccagcatataattctttaccattgccaattcttcctccggcaccagatcattctgcaagcaatctatttcatggtaaacctcccggataagaggctccacaaactcgtttgccgtttccgtattgataaccagcatttccggtcccggacaagaaacgatgcctgcagaaataccataggtatatcccttttcttcacggatattggacatcagacggcttccgaaatatccgccaaacagcgttaccatcactctggtcttcaaataatcgggatgatggcgttccaaagaaagcatccccatgcgaaccgcactctgcatggcatccgcatgttctacaaaaattcgtttatccatggaagaaaccggaataaactcccgcctttccggtttgcggaagtctttgccgaacgcttccttaccaaacatatcttctatccgccgtacacaatcatcgcccacctttccggaaacgtaaatcgtgcagttccgggaatgataatgccggtcgtaaaactctttgagtacagcaggatttatcctgccataatcctctttctgcaccagtcgtccgcaaggatgcacctcaccatatacagctttcatcagcgcccgatgcgccagaaaatccactttggacgagttgaccatgaactgctggatattattttctattataacacccagctccttctccggaaatacaggctcttttacgatggactccaatatttccaacgtctgtggcaaatatttgttcagcgaataaagagtaatatacgcatattccgatgcgctggacaactccagccaggcaccgtaatagtccaacttctccgctatttcccccgcactgtaccgaagcgtcccttcgcgcagcatacggttcgtaaacaaagcctgtaacggttgcgactgttgccaacgcccgccttccatcagcaggtctatgcgcacaacttcattatcgccagaatcaagcacattcaaagacacaccattgggcatagtgcaccgttggggcatctgtacggctaagtgctcaatgtccctcaccttaggctggatggtcctgtccaaaatcatccccgaaccgatattcattgagcgtttcgtacttgcaggaaacgttccgcatgttccaaatcctgcggtgtatcaataccgattgtctccacttcggtaataccggctttaatggtataaccgttttccaaccagcgcaactgctccagcgactccgccagttcaagagaagactgcggcagcgaggttatctctttcaacacttccacccgataggcatataatccgatatgcttgtaatatgtatggtttttcagccactcccgcttctccgcattacgttggtacggaatgatagaacggctgaaataaagagcattcatgttcttgttgagcactactttgggagagtttacgttctccagtgcctcaaaaccgttatctgcagtaaagggttttactaaagtggcaatctgtgtggacggatcgtcaaaacaggcctttacggtctccagttgagacggctgtataaaaggttcatcgccctgaatgtttaccactacatcaaagccttcccctactttggtacaagcctcataacaacggtctgtaccgcttttatgatgcacggacgtcattacaacttttccgccgaatgcttttacggcagcttcaatgcgctcgtcgtcggtagctacataagcatcatccaaaacaccggccacttgttcatatacccgttgaataacggtctttccacccaacaaagccaaaggtttggcaggaaaacgcgtagatgcgtaacgggcaggaattattcccaggaatttcatatctttaaaacttaaattaccacattattataaagaaacgtttcaatggcatttgtcgcctcagactttccatcatccaattctttcagtccgcggatgatatagtcccgctttaaatcttcgggtttatacaccctgctgtcacaagacagcaagtctatgtcaagacgtacaatctcctgtttcttttcttcgggagtccttccggcttcccgttctatatccttcaaatgaagtatgacttcacctgcatcagaatcggacgtgaagcgcgccacctgattggcaaacaacgcctgccgccggaaaaacaacggttctgtgtccgcttctgcagaaaaacggatattcggaaaaagttcggacagcctcttgcgtgccaacgccagattctctttcctgttcacgttactgccgatgcagattgtgtacaccatttcccaattcttaattaaacaaatcgtccagtcccatttccgatgccggttccgcatccgcatcctcatatccgctgtccttgcaggggtcaaaaccttcaggcagctggaacgtttcgttttcatcataccccaaagacttgtcgccaagcacttttaccatatacttagcccagataggcaatgccatggaagcgccttgtccgtgcaacatcgtatcgaagtgaatatcacggtcttcaccgcccacccagcagccggacaccagcgaaggcgtaaagcccatgaaccagccgtcggcattatagttggtcgtaccagtcttgccacccatatcggcttttacacccaaacggcggacacgtccgcccgtaccttcattgacaactgcacgcagcattaccagcattttataggcactggatgcgctgattacttcctgcatttccggcgagaatgtagccagcacattaccatcgttatcctcaatacgggttacaaacagcggcgcaacacgaatacccttgttcgggaatgcggtataggcgcttaccatctctcctacggagacttcgcaaggaccgagacagagagacaccgaaggcacaatctcacggttgcgcacaccgaagctgtgcaccaaccgcttcaactcatacgggttcagtttgctcatcaggtatgctgtaatccaattgtccgaattggccaatccccacttcaccgtcaccatgtcaccgtaacgttttttattggcattgcgcggtgtccagggttttccgttttcgtctatcaatgtatattccacatgacgagcctggtcgcaaggagaaaaaccgttctccatagccagcgaatacacatacggtttcatggtagaaccgatttggcgacgtcccaccattgccatgtcatatttaaagtagtgatggttcgggccgcctacatacgcttttacatgaccgttacgcggatccatcgacatgaagccggcacgcaggaagaacttataataacgtatggaatccatcggagtcattacagtatctttctcaccgctccaactgaatacagacatttgttcgggcgtatcgaacgctttcctgatttccgcttcggaagctccggctctcttcatgatgcggtagcggtcggacagtctcatggcacggtccagaatctcgtctacctgttcttgcgtcaaacggaaagtataaggcgctttcttcgcaccttttttctctttgaagaagtacccctgcaattctttcagatgctcggtcacggcatcctctgcatatttctgcatgcgggagtctattgtagtatagattttcaacccgtccgtataaagattatatttgcttccatccttcttcgtattcttttcgcaccagccgaacagagggtttgtttcccagtcgagcgaatcctcgtaatacttctgcatctgccagccgcgatagtccgatttatcgggcttcttggcatttagcacaccacgcaggtattcacggaaatacgttgcaagaccttcgttatggtctacgcgatgataggacagcttcaatggcaatgcctgcaacgaatcccgttcctcaacggtgatatatccggccttgcgcatctggtcgagcaccacattgcggcgtccgcgcgaacgttcgttatagcgtaccggattataaagggaaggattcttgcacatacccaccagtgtggcggcttcctcaattttcaaatccttcggttcgcaaccgaaataggtataggcggcagtctttatacccaccgcattattcaggaagtcgaacttattgagatacatcgtaagaatttcctctttggtataatagcgttccagctttacggctataacccactcaatgggcttctggaacagacgttccactatgttgtcggcgcttggcgaataaagttgcttggaaagctgctggctgattgtactgccgccgcccgcattcttctgcatcagaataccacgcttcaccacggcacggaacagcgcgatggcatcaatccccgaatgttcggcaaagcgcacgtcttccgttgcaatcagcgcattgataatatggggcgacaaatcattgtatcccacaaacacgcggttctccttgctataagaataagttcccagaactttcccgtcttccgagaatatttccgttgcaaatttataattgggattttccaaatcttccacaggaggcatatagccaatccaaccttttgctatcgagaagaaaataacaacgcatgtcaatgttatcagcgcgatgaaaatccaaaggacttttacgactttctttatcatgtccggttcctaaaattcgttggttcaatattcaataatggggcaaagatacggaaatatatcaaaacaactctcacaattttaatagaaaactctaaataccccaaaaacggcagaagctccggaaacctgcaaaagcacaggtctccggagcttcctaactcattgcggactttgacagtcagcgaagagacattatttccctcgccagcttatccgtcagcctcacatttcctatccattttccgaaagtctccagattatgcaaatccgtccctaccatgtcgtacatacctttttccagcaatgtttcagcatttttcatcacctgttttccataataaccggaaagcgaaagcaagttcagctgcaacagatagcccttgtccttcaattcgcaataatcaccgtacctcatataaagataacgttcgggatgcgcaatcaccggcgtatatccggcgagcgatacattatacaacagttcgtccagattgtttggtggagaaaaataagatgtctctaccaatacacaatcctcacacaaaggctgcaatcccttctccagcctctccctgaagccggagtccaacatatattcagcccccagttcaagcacggtttctccggtatagcgcttgcacaatgtatcgaaagcctgcaacacatcttcccagtgttccacaccattcatcacatgaggcgtcagcctcaccttcttcactccgagcgattcgaagtacgccaacactgtcaaggattcctctatcgtccttatgccgtcgtccacacccggaaggatatggctgtgactatccacaaaatccctgaagaaaccggtatccgccaactttgttttatgtcgtaagaaaaacatacccatagcgtttaaattccaaatatccttttgtacagcggcttcttgttcttccggttttcatcgttcccgtaattaccgtaaccatacccgtagccatacccatagcctgtctttacataatctattccgttcagcagaatactcatattcttcatctttcccgaatcatacagttcctgcaactccggtaacatccgcttgtcgaacaagcccgagcggactacataaaccgtctgatccgccaaccgtccgcacaactgtgtatccaccacaacaccataaggcgggttatccaataagatataatcatagttctttttcagctcctccagcagccggtcgagtctgccgctcttcagcaattccgcaggattgggcggcagcgctcccgatgtaatgatatgcagccggttatcatctccacacacctgcaccagttctttcacatcatccaccttgccgctcaggtagttcgatacaccggtctttttcatacctatccctacgcttttgctcaaagagcccttccgcaggtcaaggtcaagaatcactacctttacattcgccagcgccatgctcatgcccagattaagcgtaataaaggtttttccggagtcaggatttgccgaagtcaccagcactacctttcccaccgttttcttttccgtatccataaagtccagattatcgcgcactatcttgaaggcctcacaaatgcttttcctgctaccttcctgtaccacgatatctttctcatgcttattcttttcaagcggcacttctcccaagaaaggaatgttcacacccgctttcagttctttcttcgtatgcacgctggtattgagcagcgagcggatataaatccacaaggcaggcagcataatccccgccagcaaagcaatcagcgctacctgcaccttcttgggtgctaccggcaggtccacaccttctgccgggtctatgatgcggcaattgctctccgtaatggaaagctggagctcattttcctcttttttattcaacagaaacagatacagttcttcctttatcttctgttgccgttctatgcttaccacatacttcaactgagtaggcacgaatgctatcttattactgttctcccgctccttgttcttcatattcaccacctgtatctccagacttgctatcaggttatccacagcttttgcgatagacaggcgcatggacatcagcgtaccgttcaggtcacgcacgagcggattattggcactactgttggctatcagcttgttcctgcgcgtcagcaccgtgttgtactccataatcaggttctgcactcccatatcatctatcccgatacttgcagggacaggctctgtcgttttcgagttatcctgtaagtattccttcatatattgcgccatattaagctgattttccacgcttaacccttccgtatcaagcatgctcgaactttgcagatacaaagcgctttccgaagcaatatccgtcagtctgttctttttcttataattctcaatttccgcatccacggcagccaggtcggcttcgattatctccaaccgctcgccgataaatctggcggtatttatcacaatcctgtttttatcctcgatggcatcgttcttataaacctcaatcagtgtattcagtaaatcttccgcccgctgcacattctcgtcctcgatgctcagggctatcagtgacgactgcttgtttgccacccctacattcaaagccttgttatatgactccgctacttctttcatatttcccttcgtcacgtagaccgtcttgcctatgctgttttcgtccgtaaacagtgtcgatgccaccaccatttttcccaccggagtattcaccgtatctcccggctgcacggtcaggatttcgtcaaattcctcttcttcctcttcattttgcagggtcatatccgccagcgtcacctttccattgtccgacatcgtaacagtaaggcttatctgttgtgaaggagttgcatcaaggaaggtaacggcaaacggcgtggacgtatagagttccttctttctcagtccgtcccactccttgtaacttatatccagatgcagtgtttcgactaccgtccgcatcagccgcttacttttaaagatacccacttcgttatctaccgtgctgccacctaacgaaaacaaatcctgaaaagcagccgcaccattgacacctccgcctttttgctcatccttcaccaataccgtggcggtacgcaaaaatatcttcggagaacttttcagatacagaaaacctatcaggacacacaccgctacggagaggatgaaccatttccggttgcgatacactgccgacagcatatcggcaatcaccgtgccctcctgccggcggctgtcattaaaatctatgaagtccaaatcttcaaacctgtcttttctcataaactttttctttactgttttttatttgaatataagcacggccaaggataccattaccgatagtatggaagcaaacgtacctatggttctgttctggtttatctcccgttgtcctgcctttaccttattgggttccacgtacactacgtcattctgttgcagataataataaggagacgacaataaatctttgttccgcaaatccagcgaaaccactacccgctctccattttcttcccggacaacctttatattctcgcgctgcccgtaaatggtcaggtcgccagcaaggctcaatgcgtccagtaaggtgatgcggtcgctggttatctcgaatgttcccggccggttcacttcccccaataccgatactttgaagttcaggaactggatggttacgatgggatctttcaccagtcccttttctatcaactggcttttgatgtattttgtcagttctgcacgtgtcattccctgtactttgataactcccaactgcggaaagtcgatatttccctctttgtccaccagataccccaatacccggttctgtcctcctgcatatccggtattgctgttagctatctgataacttaccatcggcagattgaacatctgtgccagttcggggtccttactattcaccataatggaaagcaaatcatccggatgaatcctgaggtcataatcctgggttatcttttgccgatagtcatccggcacatcttgcaggtacgaaatctgtttttgcgatgcacaacccgccaggacacatagtacaaaggctatgtatccatacttcttcatgttctttatcatattatcttttttctactgaaacattaaattaaaatttaaacaagttcttaataagccacgatcttatcgagaataatatttgctgccttggaattaccgaatagttgaggaaaagacatattactgacagacaatacgttgtatgcattcacaatcctattaaaatccgcatctgcaattataccggcattattttccacgatttccacccattcggtttctgacctaagaattatacaaggcttttcataaaagaaagcctctttttgaactcctcccgaatcggtcataatcaacttggcattcttttccaaactaatcatatcaaggaatgaaaccggtggcaaaataagaatctgagccaattgcttcactttatctattaaatcaacatcaagatttatttccaacaatttagctgttcgcggatgtaatggaatagctatttttatccgatattcatttgcaatataatacaatgccttgaatatatccgttaaacgttctttactatccgtattataatcccgatgaatcgtcgctaatataaaactattagcttgcaaaccatactctcgtagtatattactctttttatcagctattgtcgcaaaatacatactgttatcatacatcacatcaccgctattatacacttgccgatgtttgtttccatgaaatatagccggagcaatttcgaatccctcattcttcaaatttgcaactgccgtatttgtcggtgcaaataaaatggaagataattggtcacaaacaattctgtttatttcttccggcatatccatattaaatgaacgtaaccccgcttcaatatgaaatatcggaacatgaagcttagaagcagcaattgcaccggcaagtgtagagttagtatcgccatataaaaccaccccatcaaaatgttccgacaaaagtatttcttctataccggctatcatttttgcagtttgttctccatgtttcccggaacctacatttaagttataatcaggttttggaatacataattcttcaaaaaacacctgagacatattcatatcataatgttgaccggtatgaagaattttttcttctattctgtcggagtaattatttcggatagcacgcgacaaagctgcagcttttattatttgagggcgtgcaccgattacggttaatatctttttcatagacctacgttctactggcaatattttaaatatagaatttgtggaagcaatttcattctgacaacaagatatataggaaaacggaaaagccggtagaatgaaaggagtgttttaaactctctatgagaatgtgtcttttcctgcatcatactttgaaactgttgcgggctaaagcccaaacgcgcagtaacttcatctacgatttcctggtcgaaagaatacggttgtccgataatcttcaacgcctccttccttgtaatatgcccgctacggatttgtgccgacaactccgtcttccgtttgtctatattaaacttcactggtagataatacgactggataaagtgagtaaatttattttcctggtgatgtccgccgtaatcttgccatttaagtttctctttcagttccttatctacatcttttttcctataatccataaactcaagaattcgaacctctttgattctatggataaatgtatcgacaatcaaatcccggctggtaattgtaggaatagaccgtatcttatcatatcgaattgtcccaaactcattttgtacattctttatataaaccgggtcaaagtaagaccagcttatcggagacgaaccctctgtacgaaaactgtgcccattcagtatatacctgattttatattgccttgccagctgatgtaaagccgcataaatcgctaagtccgtgggagagtcgacatccggcacgccggctataaagaacgaacgctgtaaatcccggtattcattccaatcaaattttattgttattggttttaactttaaaatatcacaggcattctttatattagcatccgctattgaagttccccagccgttatccacagaaacaaccaatggcctcaggccgtattcaacagcttttaacagcgtgtatgaactatctcgtcctccacttaagccgcagacacaatcatatttcttgtgtcgtcctgcatctttaattctattaatgagcttttctacttgaaactctgaaacaggatggcttctctccaactcatcatgtatatagcaatatttacacacaccgtctgaatcaaaagtattatcctctactgttgaatccaagacacatcggttacatcgttttatggtttccatatttataatatcattttatctcgttttcaataacatccgcatagaacttggctacatcaattttatctttatatacttgctttactttttccctccatacacttttcaaatcaggggtagacaacagttcttcaattacatttagaaggcgggagggattatcggtcggtatacccactccaagcttgtaggtatgttccacttcattaagaacactaattttacctacaaaatcattataccggatatatggagtacccaataaccctgcttcgaaacacattgactggctatctccgataaaaagggttgcaaacgaaagtaagtgatgcattaaattaggttccattttcaggacataccggttatatttcgcatcaaggacagtttcactggtgatgaatatacgtccgtaccttgataaaatatcaatcaagttatccaacctcaaatccgcaactacgcgcctaatatgatacagaagcgaaaagaatctgcatcgttagtaaaaagggggcacagtgcatcgaatgtcaccataaagacatataaatgccccttaccccaccatgcgacttgaggcaatacgcaaaatcacgactataagttgtcggtgttatccaaagtcattctggaacacattggcataagcattgttgcatgaatagatattcagcacatacttccttgatgtcctgacccatttggctggcacagagatgaacttaaagacaaacgtcttgatgcggcttgttgctttgagtccgaacctcttcacgtcaagcctcgccatgatgaatttatagaagttgcgtatgagtgccataagcagaagaaacaccgtgttttctcccataaaggattttggaagcctgttccagccgaatccgttattcatatcatcgaagatgcgttccttccctccacggaggttatagaattcgacaatctctttctcggaagactcgtagtcatttgtaaggatgcagcggtaggtgtattctccttcccacaggtcgagttcgccgtctatccgcttctgtctttgaatcacaagacggtatgccttccctttccatttctcgatgagaatggaggccagctcaaactcaatgccgcccaattccactttcttccaacctctgagggcaaagatgtcattgtagagcgaactgcatcggttagcacggatatagaaggtcttgcagtgtttagcaatctcttccactatctcttcagaacacgagccgcaatcagctctgaaacggttgataataagcttgttttgttcaaacctttcaaagaacctcttcagcgtgtccttctggtggaaacggacatttgtgttgccgtcgctgttctcaatgccgacaatcaagttgccaataaccgccacgccagggcgataaccaaggaacttcttgtatgtaggcttcgcatcaaacttctcagcctctatgaactggtggtcgaagtcaacgtcatacccctcgccctctttcagctgccctgtggacaataggcaattgaggagcagtgtattcagcttgtctgccgtgttgaagtcgtaggtcttgccagtgtcggatgtgtaggaaatgttatcctgggtcagttcctttatggctctaagaatcgtgtcggcactgcatgtgcgaagtgtcggatgaagcgaaaggtggtacatcagatgagtggtgacatcctcgatgcatgagccgccacaaaaataaacgctcataagcgaacggatgatttcgctgtattgataaccatacagcctgcatctcataccgagggttgagtcgattacagatgagagtctggagtcaaattgctccattattgaaaatattcctccaaaaggagtgagtttctcggatttaattgctacctttgccatgtctgtcgggtttgatacatattttgatttgcaacactaagataggtgaaaaatctgacatggcaaattcctgagcaactttttgttgctcaggtacttaaaaagttatatttgtaatagtgttgcggaattaaggtccaataagaacatagaaattccattatgttgtcccgtgaggtcatgtcctgcggtaagactaaccaaccgtattataaaaaacgattcatccttacccactatcccttttatcaactcataatcgggagaaaagtaatcaggatgtaaataagctattttttggtatcctttataagctattttctttcttgtatacttacccaccgaacagatatccggtgaaacaactttcgtaacaaatggataggcaaacatacatgccaatttattaatttcaaaatcatcctcattaaagaacaaggttggaatatttctcagttttccaatgtgtgtaatgcttatatcagttccaatcataatcgaaggcctgtacttacggacaaaacaaaagagtaaataatcctttctaagtaaatcaatgccagcaccccagaaaacagataacatactcttctttcgtctaatctgttcgtttagttttatgtattcaacattttccgcaatcatcagacgttccaatatatctttattactgataacataaagcggctcataccctctttgtctaagaatggctactgtattcttaaacaaatggtaatgggcgggatgattcaatgaaacaagtatttttttcatatttgaaaaagaaatcgatgaacgtaccatacagcaaggatgcaatttcgaaatggagcggttgggcatagacttaagctggaaatcctcacggatagaaggcaatacatattccctgctctaaaccttaaaattcatacttcaagaaccggattattaaaaggctctgaccgtaagccatgtcgaagatattcataatattctgaccgataatttgaatgtagaccggaatatccgttcccatcgtgtcggcatcaccggcacaacaaaaaagcaatgtttattttctatgaacaaaataacatttctgcttttaagagaatatttaaggaacaatttgagtttgcggtaaatatttatttttgataaacaacagagcaaatagtacagaaacttaagcccagttcattgtactacgtatttggcggcacacggtttcaaaacgatctacctgctgcaaccaaccagggacatctttgtttatccaacccaatacggtaatcattttctgatgaatctcttctacccgatgcaaattccagcaaatagattcgttatgaaacacccggttacggaatgagcggaaagtattcaatggtgcagaaacattcttccgttgccgttcttttttgggaagatatggaaaagcacgcctcaaatctttccataacaaacgttcgtattcgctattcaacaacgatacccaaaaacctaatgtcaattcggctacaaccttggaaggggtgatattttcgtgccgaccggcaatttgttttgctgcctgagtaatgtagcggttcaaattagtcaatcccggtgtgacaggaaatacgacataccaatcttgccgtccggtcatcgtttccatttcccggctaagtgcattacgcagagtaacttcaaaaaccgaaagactagtgtaaaaagcttctgccaattgcaaattgcactgataatgcagtacagcccgtgcttcatcattgggatagcgtataaaatatcgttccatacgcttattcgaaaaaactttttcgagaaatgatttgttatatatcataataatcagtacttttgcaatgcagtcccgggcgttcctctcccagcttttagttactggtgatgaatccgggtttttttatgcccttttacaaaggtactctttttgtggtgaaaacctatttcagacaacatatttattttttgcatggattctgcaaacatcctcataaatagtctggatacgccgggctatatcagataaatccagtcccgattggataatacggtttctcccatcggttctttccctcaattcgaatatatgtaacagtttatcagcaatatcttccggttctctacgtgcaataaaacaaccgacgatacctgaaatcatatctttaacatctcctacatccacgcttataatagggcagccgcatagcattgcctctttgatgaccataggcgatgcttccttgtctgaagtcatcaagaggcaatcgcaagcattcatcagcagattaacctgaaccctatcataacctttcaattctatcaactgacatccatttaccaaagtaacggctttttgcgctaatgcgtaattttttactttattctcgaatgcaccggcaaataatacatatttcccgctttgttcccagcctaaatcattacgtgcttcgtctttaggaagttcaaagaatgtatgtgtatctgttccgcatggcagtattgcataattactttttttatacttcgctgtttcataaatgcgtctgctcacaaatatattaaaagcagaaaggtacatgcaaatcttagacagtaatagccaaatgcctccggagtgaatatcactgccatgaaaagttgtaacgacagggacttcccgctgtaaattagccaacagtccggacaacccgtaatgtgcatgaataatatccggatgatattcttctatcttttttaataaacccttcctatttttcaaataaccgaaaacgcctttccctttaaccggaaagtaatctatctgtatattcaaaccttgcaccgattctgcctgctccgatacaaatggagaatattttccgtaattataacttgcaacgattaatactttcatatcattgatatttgtaattttgaaacaggcacattaattatccaacaagttttttcagaaaactgaatccgggaacttccataagccgtatgacaatacagctgaaaaagaatgtcgacacagatgccaatgcaaattgcggcagaccggcatatacttccggaaacagatatactaaagtggcaacaaaaaacatgtgagagaaataaatcaacgtactcatccgtctgaaccatagaaacagctttctgtctgccaaccttatccggattacaaacagcagaatacagaagcaaagtaaatgagtggaaaatggtaaatcatacaaaaatgcagcaacggataatgctgccacccaacagctccacacagtatgcctcaaaaaataatcctgccatttaccaaaaaacatcccgacagagacaaagccaaaacccacgaacaaaccgtttctcgtaccaacgaatgtctttttgtaaacataaacaattttctccaaacaatcatctgcatgttccgtttccaaaacgtattttatcccccaacctatcaaggtaaggcaaagtccgcttatcagaatccactcgactttcattttccattttaacattatcttcacaagaaacgatgcccaaattaaagccaataagtaccacagaggccagctcatatggttttcacctgtaaatatcacattccggcaaaacaacgcgaatgccctgagcaaactgttgctctcaactatacacgaaccgtaaaaagtcagtggcaagtaaagcagtgtccatagaatgtagagctttaccaactttattatgtaactatttattacccccccaataagttttccacacgtttaccgcacacttctacggggcgctgcatgcttattctgcgttgcaatagaaaacccgaaatgacaaaaaacatcggtactacccacggacagataaatcgcattaagagtgctgagtcatacgcagtgtgtatcgctatgacaaagaagctcataaggaacttcaaaaggtctatactgttataatgtttcatctgctatccgttttctgtttgaaatagactttaacagttgcctctcacgaaacctatccaggatgctatctgtatatcgtaaatgagccaatcctactcttccgtttttacatacaggaaccgataccggcacgtatcgcatcagtccgatacatataatcataaagaacagtgggtctttcagttcaatactcgaaaatagccaagcgcaagtcataactaacaacagcatacgacttgccatagacaaatcatgcttcaacgtataccaaaaccgccaaatcactatcggaaagaaaataaagaaagaaactccccaatagatgcaattattggtaaacgatccagacccttttattgttactccacttcttgttttcaataaaccattttcattcaacccgtgccccaaaggccattttacaatgttatctttagcaattaacatattaggcacacgactgatgttctctccttttgaaagataatcgtaatcggaaagctctttctcttttgcattgttccaaatcatatcaattttctgcataccaaacggcaatacatagaaagaatacaaaaagacaattcctcccagcacgctcaaaattttataaatcactttccggttattcagcacgataaacatgaataccataaccaagctgataaaataagttgtagaaagtgtagtcagcccaacaaacattactatccatattttccgatccatttttatccgatttctcattagccgtaaacatatccacaaaagcagtaggaaaccaaagaaagaaggttctgaagtaaatccactattcctcaaagcaccgtcatttacccaagaaggataagctgtatacaacagaaaatgccaacggtttctttggtcaccatcgccgtccaaattcataaaacccaagtaatcgtgaaagaaagaaacatcaaacagctgcaccagccaaaacggaatacttatcaaagcaagagtataaatcaacctgtcatagaaagaaaaaaaattggtaatcacatacttcaagaagaaataagcagtcagatatcgcaggttatatcctacataattacttaaaaactccattgaaaagccaccccattttaatatcgaaagaaagtttatcacagcaaacagcaacagaggaataagtatgacagcatcaaacttcttattgcttttcatcgcaatgacaagtccataaaagaagaaaaacaataatacaatcgtatttcttgccaacagattgggagcagatcctacataaaacaggaagtacacaatacttattacatttcttgaaatctgattacccatcatacgtttttttgcaaattaccaatatagttagaaacagtcgctttagtatcttgcacaatcaaggattctgataagccttgatataatcggcaaccatgcgcctgaccgagaactgctccgctacataagtataagcactgccggcacgttccatagctttatcataattattatagatatactctatttgattggcacaatctgtaacatcttccattcggaaagcatatcctaattcaccgtattttataatttcataaggtccaccctcgtccgataccaacacggggagcatggcagcaattccctctgctaccgtcagaccgaaaccttcataacgggcaggatgacacattaaatcatattctttcaaatggctgtaaatatattggcggtcgcacagaccgagaaagttgatttgattgccaacgcaatactcttgcaccaattgtctcagcctgggttccgaacgtccttctccgataaagtcgacctctatgttttctatcccgcgttctttcagaagggctacggcttttataaggatatcttgtcctttcttctccacatccaaccgggatacctgtacaatacgcatgttttttcctacgaatgatgcccggcgtgtacgcttttcaattttatccataggtattccgttaggaatggtcattgccacccgtccggttctttgctgaatatcggcttttacagcttccgatatcgctatcagttgcgttccacgccctgcatgttccaaaggaatgtgcaggtcgtggactgttaaaaacagtccacgacctgcgcgaagcgcaattatgcggagcaacgcagagctatgtacatgtataacatcaggattcaaccggtacaacagccaattcaatttcaaaacaggaactggcgagtaactacctttctgtcttcgcaatttaaatatcctgactgccggatttatctgttcgagcaagaaatccagataaacatgatttacaatgacaagacttacagtctcggttttggactgctcgttcaatatatctatgagcatagtctctgctccgcctataccaaaactgaatacgcaatgtactattttcatacactattatttgttgttattaagtaaattcctggaattcactctcttacatacagtctattcctcaacaacgtaacggtcttttataaatcttcccggttccttgtacgaaatcactttcgccggaacgccggcaacggtagctccttcgggcacatccttcactaccacagaacctgcaccgatagtggcattattacctatatgcacatcttctacaatacacacattggggcctatataaacattatcgcctatcacagccggtgttcctttgttgcttccgatagtaagaaactgactgatgtttacgttattgcctatcacagtaccgccgttaataacaatacctatcccatgacctatataaaacccataacctatcttacacctgcggggaatctgtatgccatactttttggaaagccgcctgtgcatccatatcgctaaaggaaatagtaagtttttctgtgaagcaagtcgcaaccaaaagcagtagttaaaacgatgatcaaaaccgaataacaaatatgtgacaacattttttaccccccccataaacctttatatcgctggtaatcagacgatataaaggtaaaaatctcttttatagccatattgtgtataattaatttatgcaaatcaagaactgagaaatccaattcgtagaattctatgaatgttttttcattattgattttaatctgccgaaatagaagtcgaactcttgcagcccgaacatttttgaaaaagagaaatacaagacaaaatagacagaagcttgaattaaaatcaaataaacaggtccagcatcgaataaagctgaaaaacaataaaccaaagccgctgccgaaaccgcgataaaaaaggccggagcaagatctcgaagacggaaacagatatcgtaatgtatcagtttgcctacatatgcggaggctgcgatgtaaaacaaaaattgagagaaggcatatcccgcaagcaacccaatcatgccgaaccggatactgattgctacaaccgtcagtcccattatccgaagtaagaattccagaatgaaaacttcacggcttttccccaaagactttatgacattggtatgaacttcaaatagcgtagatgacaaacctgcaaaagcaagaatctgaaagtatggaaccattggaagccatttatccgtaaacaaaactgccaccaacggacgtgccgtaattatcagaaccatgattatcggaaactggatgaatgcaacagagcgtatacattttgaaaaagcatttcgcagctttgccctatcctcctgaatgttggagaaaacaggaaaagtcacattagtcaccaccgaggatatactgttccgaggtacatcctgtaatttgttagcctgcgaataataccccaattccacagacgaaaagcatcttccgataatcagcgaaagcgcactgtaatataagctgttcgctatcgaattcaggaacatgaagctgccgtagcggaacaatccggtaaaggacttccaactgaacacccattccggtctccacttgttacccagccaataaatgccgcattgcaccattcccgttgccaacgattttacaaccagactccaaataccgcatcccaagaatgctaacagaatacccataccggtacccgctacgatagccgtaaggtttattttcgctatcttcttgaatgcgatttgcttcttcaagatattctgctgaatcaacacaagagcattgataatcaacactattccctgtactttcaatacattgtccagcagaggtatattataaaatccggctattgcgggagcacataaatacagtacggcatacaagatgaatgacagaagcagattccaatagaataccgtggagtaatccgttgcagtagtgtttttcttctgaatcaatgcactgccgaaacctccgtcaataatagcatcggacacactgataaagaccagcagcatggcaatgcacccgaagtcgtcgggagaaagcaggcgggccagcacaagattggaaatgaacagaaacaatgatgctccgaaacgttctatggcattccaaaccattccggaaagcactgtatgttttagagaatcggacatttataacttatggagataaaaccggttgagcatataatcaacttataaaatgattcagcctcttatcagcttccgcagtggtgaatagtattttcccagaaacagtttcagcctgacaaaattcatggaacccgtactcaatccataccggggtatggcgaaaacatcatcggaagtacggaaattacacggttgtgtggaaaatgccagtttcacggaagttcctttcagaatacatttttcgcgcacaccgaagtttacacccggaattccattaggataggcaaatgtcaagaccggatgtcccagcatggcttccagccgggtaatggaagaacagatttcttcttccgcccgcaggcctgtttcatttgccaggataggatgcgtcaaagtgtgcgcacctatagctaccaacccctcacggtctatctgcctgatttgttccgccgtcatattttgcggcgctttaggcgacacatgatagaacttctgatagtacgcaatcattttccaaatatcatctatgttcatttcctttatccattccgtatggacgggagttttcagattcagaaattctctgcctatctgccacagacgatccatgtcatagccgcttatttcctgaaaccaaaaattggttatgccatccctgcacgctatcttgggcgacacaaagaaaacagccggtacattatgcttctttagtataggatagattacttcagcagaagacagatgaccgtcatccacggttatcagacaggcattgcgcaaagtcttcccgttatagtaatggtcatacaattgctttattcccactacgtcatatttctgtttcagataaacgattacattctcaaaccattccgaattgtttactgcatgaaaattgattattttattcatcccattttttgtttaatgatttgccggatataccgaacatatgttccatctctaaaaaagcattctacccaatacccttttctactgaacaaaagcagcaaaagagcacgcataacggttttcacattttttcttctcaatacttccgccacagccgacaatacggatatatacctgataccatcccgctgtcggctttctttgcaaggcgtttctcctgtccggtagtattgaaaagccgcatcggcaatagagactcccgccatatccgaaatagggagaaatccctctgtccgggtactcatctcaatgaaatagtatgcgccattgcattgtttgtattcaattccgccgattcccacatagcctatccgtttcaagaactcacgcgccacctgtgccagttccggattataccttgtagttccaacagccattatcccattggattgcatggttttcactcccatacattccgttacatccccctgtccgctccggaaaaagacataaaaccaatatgaattatcactgcccggaatatattcctgacagagcaggttgcctgataaagagttccacagatcctcttgcatgaacccgttcctgttgagtattttatatttaaatcctatctgctccccatgttccactgacaagggttttattattacagggaaagtaaatgtatccgccactttttctacatcctgcatatcattgatacaagttgtgcgcggaacggtcagtccgttcgcttttgccatatcgcccgccttgttcttataacagaacccgtctatgatttctgaagacggcatacataatgtcactatccggtcgaagcatgctcgcctcttattgacaatcatgcaatatatatctgctgtaaacaatagcaacggcttcccttttacctgacaatgcgtgcatatttcagtaaacgtatgcaacaaatcatcgacagcggaataataaacggccgacacatattttgaatgtctgtatatatcgcagcggtttctttctatacacaccacaactgtttgaagcccgtgcgcttcggcacttctgcaaagagacaatacagctcccaatgcaccatctaaaacaataacggtttctttcaaattacaagagtctgtttgaattttatatcaaaagtttttattcagcctgctttgagccggcttttggtctgctttcctcttttcactcatcacataatccacttcatgaaaacaagaatattgaccctgattttaatcagcttccgtgtgtccgcctcgaaaggtattgtataatgtttgccgtttatctgctctatggcaaatccgaaagcggatatgacaggttgccaccctcttttataactttatcgttacgcgcgcgagaatttattgataaatgtaacgattacatttatcatttctaaaacacatacccctgtaaaagttggaaatatggccggcaacctgtcaactacgggcggggaacatgcagtcgcatatagtccgcttcgagccgtaagcccaactctgtcaatacgttatacagttccgcagggcggtttttcaactcttcccggtagatgcggaacacactgtaatactggctcagctttaaactttcgccctttttaccttgccataggtctggggactcatcgagattttacggcaaatctctttgtcgttcaggcgtttgccacctaccagaatcgtgttttggagcagttccaggtagtcgccaagctccaagtggacgaattcctgattcagattttgagtcatctataaatgcttttaaaagttaataatgttaatatatcatctgtccggttcccacatgcgggaaccgctgttttccgtatccggcgctttattcggaacttcactccgtaaaaccctaataacgataataatgaaagaaacttcaatcagccttttcaaaggttactcggatacacatccgcaggacagcacgttacaggaaatcgtaaaccttatccgcaacgatgcactggtgcgcgaccgtaccgagaaacaccgctattacagtcataacggacaaaaggctgccgctgcatgggagaaagccgcctgcccgtgttttgccgttgccgtgtgcttcggaggcggcaagcaggcagaaaacatcacgggctggacttcgctggcgctggcagacatcgaccatatcgacgccgaccgcctgccggaactaatcggacgtgtccgcgccgacaagcatacgctgctgtcctacaccactatcagcggtacggggcttcgcattatctaccgtacggactgcctgacgaccactccggagaagaaccggaaagtctattccaaaatcttcgagcagggcaaccgctattatgccgacctgctgggatgcgaatgcgacctgaaatgcaagaatatcacgagactcagcggactggcacacgaccccgacgtctacttcaatcccgatgccgccgccatgcccgtcgaactgaaaggcgacaagaaagagcagcccgccaaatcctctatccgtaacaggcggctggagaaagccgtcgctgccgctgccggcgaactggcagaacagggcatcgtttacgaagcacaccagcgcaaccaatacatcatgcgcatggggtatctgctcaatgcctacggagtggcgcaagccagcgctaccgggtgggcggtgaaacgctttgccgactacgacggggatgtagccgccgttttccggtcatgctaccaacacaccgaagagcatgggcggcgtccgttgcaagggcggacgccgaatgccggcggcaacgacggatttgccagtgtggaggacatcgaacgcttcctcgacacgcaggcccgtttccggtacaatgaggccaccgggaagtgcgagacggccgttgccggaacagacggcgccgaaggggaatataccgaaatagacgaccgtttcgtcaacaccctatggagccgtatgagcaagcagggaaaaaccgtgcgcatcaatgacatccgtgcaatactgcactcggaatatactgttctgttcaatccttttaccgactacttcgaagggctgaagccctgggacggtgtgaccgaccatatcgggcggcttgccgccacggtgcacgtaaagagcgagcagtccgtattcgaaggttacttcaagaaatggctcgtagcctccattgcctcccttttcgaccgggaaacggtgaaccacgagattttcgtactgatcggacctcagggcagctacaagactacctggctcaacaagctgctgccccctgtgctgcaacgctatttttacatcaagtccaacaataaccgcattaccaaagacgatatgttttcgctggcggaattcgtctttatctgcatggaggaaatagacgaactgggggcgtcggagctgaaccagataaaggcgatgaccacccagaaggtggtgaacgagcgaatggcttatgcgcattataaagagcaccgcgcccacattgccagcctgtgcggaacgaccaataacgtgcagttcctgacagacctcacgggtaaccgccgctggctgccgttcgaaatcagcagcatcgacaatccttatacgcatcccgtggattacgagggggtgtactcacaggcgtatgcactttggaaaggcggcatgcgctattggtttgaggacgaggagataaagctcgtaaacctgcacaaccgtaattttgaagtgcccagcatggagcgcgaactgatacaggcttattaccgttgccccctgccgggcgaaaagggtacgttcgtatctaccaccgatatactgagccgcatcaactctgccgtaaagcactaccttagccccgtaaagatagggcttgtgatgaagcaggcgggcttcgaactgacgaggtcgaacggcaagcgggggtatcgcgtggtggagctgccgagaaactaaagggctacactacggcgctaaagagctatactgtgcggctaaagggctatgttacgatgctaaagtcgagggtagtttacggttcgcccaacgcctcgactatgagccgtacttgcgccggcgtgtatgtccgcgttttgtccgaggcgaccagtgcatgaaggctgctccgcagtgtggggtggaaatctatccactggttcagcttgcggaaggcggcttgcgggcaaagtcccggactgtagagctgggcaagttccgtgcgcccgtatgtacgtatcttgaaagtttccatatcttttgaattctttgtttttatataagccaaagatacgtaaatatctccacatcacagccgttatatctgtatataacgtacagtaacgaaccgtaacggacaaatagtgataaatgcccttaggctatgtcgtatcttcgtattgttgcaacaaggatatagaattttttaatttgaaaactaaaaaaacaaaagagtatgattcgttacaaaaagtatcaaatgaccggcgaaaaaagcccattgaaaggactgtggtatgcacgtccgctgattgaggacactttcgataccgaaaggcttgccaagcatatggccaaccacaacacgccctattcggaggggctgatcaagggtgtgctgaccgacatgatttcctgcaccaaagagctcatcctggacggcaagaacgtaaagctggacgacctcgccattttctccgtaggcatcgtaagcagaaagggtgccgcctcggctgccgactttacgctggcggacaatgtgaaaggcctgaagctccgtgcacgcgccacgggcgaattgagcaacgcccagattaatttggaaggccaactgaaagaggcttacaaatacaatgtggacggcagcgaacccggcagtgaaaacaaacccggcggcgacggcggcgaggaagaaaatccgttaggataatgccttgaacacttgtttttacattaaaaccaaacaacatgagcacaaaatcaaaatcggtatggggcatcgtcctcaaagtaatcattacagtagccactgcattggcaggtgttttcggtatcacgtcttgcataagctgacctgatgaaagccggaagtttcctttaccggcttctctttccccggaacactatattgcggaaagctttccaaaaatagcgccagtcggtaaggaaagggcttctgagatactgctccaggtagcggcgttcgctttcctgtatttcatccaacgtaccgggcatatccgcataaaaaggcgggataaggcccggtttcgtccggatgcgcagcgcacggagttcttcggaataaaggctgaaataatggctgctcagcggacgcacacctaccagtttcaaatcgcccttcatccagtttatcagcatgggcagttcgtccagccaggttttccggagaaaccgtccggcagcgttcacacggtagtcaccggcaatcttgccgccgctgcacagtcccgcctgtttatagatatacggttgcaggtattccgaataggcatacatcgtcctgaacttgtacacaccgatgattttaccgcctttgcccttccgcttcagacggataagcagtccgcccgaaggcttgtcgtcgcgcaccggttctttcaccttcgcggcaatgacgtagaactctccgtgtacaatctcctcgtgaagcacatcaaacccggcacggtacagcctccccagaacctcgacacgcgtaagcgcacggttctgccctttcgtcagcccgaaatagaaatccctggtgaaagaaagcttggggattatcctatgccagcaataatccagaaagaagaggacacggttaatgaccaccggattctgccgcattatcttctcgcggcggatgcccgctgtggtacagtggcaggcaatgagtccccctctctccatgcaatagttggtataggagaagagggtgttgatatgccgcacacggttgagcggacaccggtggataacgagccggggcagacgcactttatgcgcaagcacggcttcgggttccggcgagtccatgagcattgttaccggcgaaaacgcctcacggctttcctgcatccggcggagcagctccgaggagttctccgcttcgtgcacgagcctcagcagcagcgtcacgtcacggttctccaatagctccgtgtgttcgatgcctgtgtttatccccacttccgtcacatcgtccagcagaggctcttcgtagaagaaagggattttccggtaaaccagccgtctgacggcactgtacaacgcccattcgagcacaatgatgatgccggtggcaagaataatggaatagtcgtattcgtagccgggcacgcaatgccggtacagggtgcagaggaacagccccgaaagtacgtccagcgcgaagattcccagaaacgcataacgtatcctcttgtatgcaccgaactgcaacttgcgcgacactccgcccagcactacccagacaaccgccgaaagcaccagccagtaccagcggggcatatcgccgaagtagcgtgccagccagaaggcagacagggcaatcagcaggtcggaccagagtatcagaaaattccggcggaatgcagaggacataaacttgtgtatttggttggaaaacgtgacttaccttacgaaccgggaaacgtgccctatcttacgaaaccgagtatcacggaacagaccgtttctatctcttcttccgtgatgtaaggatgtacgggcagtgacagcaccgtgtcgcaaagccgctttgccgtgggacagcaatctgtgggggcattcaatgccttataggcagtctgcccgtgcataggcgtgggataatagaccatggacggaatgccctgctccttgaggcacgcctgaagtgcatcgcgctcttccctgctattgaggcaaatggtgtactgcgcccaactcgaatagtagccttcgggcgtgacaggagtctttaccctgcccgccagcaacttggtgtagagagcggcggccttgttgatatcgcgcaactcgtactcgcggaaagccttgaactttattttcagaatggcggcttgcaaagtgtccaggcgcgagttcatgccgatgcgcacattgtcgtacttgaacatgcccttgccgtgcacccggtaggaatctgccagtgcggcccattcgtcgttgtcggtaaacaccgctccgccgtcgccgtaacagcccaaaggcttggcggggaaaaaggaagtggtggagatgtcgccgaaactgcatgcacgcttgttgcctatcatgccgccgaacccctgcgcaccgtcctcgaggatgaaaagccggtgggcatcggctatcttacggatagcgggatagttggcgggaaggccgaacaaatcgacggtaatgatgaccttgggcgtcagcctgccttcctctatggtacgggctatcttccgttccaaatccgaggcgtccatattgaacgtatcgccatccacatccacaaaaacgggcgtggccccttcctgcgagatgacctctgccgaggaaaagaaagtgaagtcgggcacgaatacggcatctcccgcaccgatgttccatactttcagggcgagggtgagtgcgtccgtaccgttgccgcacgaaatgcagtgtttcactcctacatactccgccagcccggcttcgagctctttcacgggtcggcccatgataaaggcgcttgatgccgctacttccatcatggcggcgtctatgtcttgcttcagtacgctgtactgtttccttaaatctctgaattgcatgatataaacctcttttatcgtaaataattctggtatgagaatcggggacttgaaacctatcaaaaatcagccgacgatacggcaagcaggttgccgttttcctccttgtactttctgccgcacgaacatgcaagcgaagcatccaagcgtgcgccgcactcacatacccagcctatgcggcgtgccgggactcccgccataagcgcatagtcctgtacatcttttgttactacggcgcccgcggcgatgagcgcgctcctgcccaccgtatgcccgcagaccacggtggagttggctcccaacgaagcaccctctttaatcagggttttggcatatacgccgtgtacggggaaatgcgcccgtggagtaacgacgttggtaaacacacaggaagggccgcagaatacgttgtcctccagctccacgccttcgtaaaccgacacgttgttctggatgcgcacgccgttgcccacctttacgttattcgctatgttcacgttctgccccagcgaacagttctctccgataaccgctcccttctgaatatgcgagaaatgccatattttagttccttttcccaccgttgcaccctcgtctacatagctgctggggtgaacgaaacagtcattcttgttgttcattgttttctatgatttgttgtacggtttccagtacttttactacttcataacctgcctctccgctgtttatcccgatggtggagtcgagatgctccacgaaatacctcagttcctcttccaggggcatcttcttctcgtaagggatgatttcgtccggagcttccactttaacgggaacgccgttctcgaaatctatccgcttattgtagaaacggatttccttcccgtccgcggcatcgtcgaaggaaagcatgcctttactgcccgccaccaccagcaactgctgcttgtagggatgaagccaggatacgtagatgtgggcatgcacgttgccgggatattccagttgcaccagcgtactgtcgtacaccctgtcctggagaaacttcgctcctttcgcctctatcctgcatgccgaagcgcccgtgaggtagtccagcaccgaaatgtcgtggggcgcgaacgagggaaacacgctttcttccgtacgcaccgtacccaggttcagccgattggaatagaggtagaaaagcttgcccagcctgccgctgtctatcacctcttttatcttacggtacgccggatgaaacagcaggacatgccccaccatcaggcgcgctcccgtgcgttgtgccagttccaccagttcggcagactgcgcggcggtgagcgtcatcggcttttccaacataacgttcagccctttttccagcagtttcctgcctgccggatagtgaagttccgcaggaagcgcaaccgtatatccgtcgtaaccgcaggcaatggcttcgtccatgtccgcatatccctttattccgggatacagctccgtatactctttcagcctggcggcatccgcctctaccactgcggcaaggcaacccagccccgccaatgtgcggatgtggttctttccccacctgccgccgccgataacacatatttttttatccatataataagaagaatatttaaactggctctaaagcacttcgatgttggttctcacagcaaccgccttcatcacgttcttcgtgtcgaaaacggcatgcgcgtatcgctgtacaaaatcgtaatcgacattggtgtgtgcggcggtcacaaccacaaggtcggtattccgcagcagtccggcggagagggcggcttcgcctttatgcgatttgccgtgataccggaactcggggatgtaagggtcgtagaaggtgaccgacgcccctgttttctccagctcctcgatgacacgcagggcgggactctcgcggtaatcgtctatatcctgcttgtatgccacgccgagcaccagcactctggagccgttcaatgccttgcggtggcggttgagtatcttgccgcaacgctccacggtgtattcgggcatgtggtcgtttatcatcatggaagcctctatcatcgatgtatggaagccgtactcgcgcgccttccaggtgagataataggggtccaggggaatgcaatgcccgcccagccccggtccgggatagaatgcggtgaagccgaaaggcttggtcttggctgcctctatcacttcccaaaggtcgatgcccatgcggttgcacaggatggccagctcgttaatcagcccaatgttgatgttgcggtaggtgttctccaaaatcttggtcatctccgccacggcaggcgaagaaacgacgtgcaccttatcgcccagtaccgctccgtacatggcggcaatcacatcctgggcgtctttgcctacggcgcctaccaccttcggcgtgttcttggttttgtaaaccgcgttgccgggatctacccgttcgggcgaaaagcccagatagaaatccttgccgcacttcaagcccgacccgctctcaagaattggttttataagctcttcggtagtgccgggataggttgtggactccagcaccacgatggtgcctgcggtcagatgcccggctattgatttcgccgaactctccacatagctgatgtccggttcctggtgcacatccaaaggcgtaggcacacagatggctacaaagtccacatcttttataaaggaaaaatcggaagtagcgctgagcgtaccgttccgtaccaactgcgccagctccgcatcgaccacatcgccgatatagttgtgtccggcattcacctgtttcactttttcttcctgcacgtcgaagccgatagtcctgaaacctgccttggctttctctacggcaaggggcaggcccacatagcccaatcccacgacgcctaccgtgatttttctttccgcaatgcgggaaaggagtttttctttcattattgtctgttttttagattaaaatacatgcaaccggcttatacggcccgaatggcaggcggctattccgtcacttcgcaataccagcgggaaatgcgcatcatcactcctacaccggcaagcgtctttatgagatagtagccgccgcgggcacgatgcagcttacccgttatcccggcaaagggcccgtgaatgatacggacgttcttaccgggtttcgcttcggcctcttcgtgcgttatatataaggtgtctttaaaatcggggtcgcataatatgcggaactcggtcatctgcttgtcgggtatctcacagggatgctttgtttctttgtcgcaaagcacgctgaaaggaacattgcactccttaagcatcgcaagcgttgccttgcggctctcgtttttctgtaaaaagaccagattgtgaactaccgggacaagcattttccttgttttcccttctttttccttttcaacataggtcatcggaacaaaatgcactttctttctctcttttaaaaaatcactgatttttaactcctggcagttgaatgtgcggacagcataccagggattttttgttgtttgcttgatttgatcatcaaaatcgtccatatcgggcttgattatctgttaaaatccacatgatggaaaaatgtaagtccgatacgaaaaaactgtattgcaacggaaaggatatgcaacgttatcaggccgcggaacacgcgaaccttacaagtccggcgaatacgctatgatgacatgaatagaaatataaaaccgtaaacaatacatgaaataaagaagaaaatcaaggaaaaatcggggcacagccactgccatccgcaaccgggaaagctcccgctacgggcagaaccatgcaaaaatatgtatcggacttaggctaaaaaaagatagacaaccccttctccccgccttgtggatatacggcaggaaaatgcggttatcaataaggatatagcctttttataccacctctgtacaagaggtcacctctgtacaagagtgagaactcacagaaatcggaatagagcactataacagccgcgaagatatgcagattaaataaaataagcaaaaaagaatcgcctttttttcaaggcagaaatatctgttccaagccttttccgaaagggatacatgcggcaactgttgattctcaatatattgaaaattattgtacctcttgtacagaggtgacctcttgtacagaggaacgcttcctcaacacctcatccaaaagcttcttattggcagaattctgctttccgttcccgatatcctccacataaatccgggtagtctttacatcggtatgtccgagcgcctgcgctatgacagacatgtccaccgaagacatgaaagccagcgtagcccaggtgtggcgcgccacgtacgaagagagcggcttgtctacccccgccagctttcccagagttttcagcgtcttgttataataggagaacttgcgtttgtactccctgtacgccgtatcttcgtcctgcgaagtaagaaaaggaaacacatagtcgctgccgtccgaccggtaacggttgattatctcctgcatgcaaggctccagcttgatttgcaccacctggtcggtcttgcgccggtgatacacaagcatgccgccctttatctgcgatttcttcaggaaagccacatccacaaaaggcatgccgcaggcatagaagcagaacaggaacacatcgcgcaccagttgcataaacgaaccgggcttcacctgcacggcacgcagcttgttgatgtccgccttctctatcgaacgtttccgggtgcgggaaatgcccgtaaacacattgccgaaaggttctttctgctccgtaagcccctgctccaccgccttgttgtagacagcacgcaaagagcgcatgtagcaagacaaggtgtccttgcatatcccctttctccggagccattccccgtaagcgtctaccagcctgctatccacctcggcaaaggagatgtcctttttgccatgaaacgcaaggagcgaacggagcgcagtggcataattgtccgccgtactgtggcggtgcatgagacgggtgcgcgcaatctccccgcgggcaaatccggagaaactgccggtagcggcgggagactcttcctttttccttttccggcacggagagccgccgtcgcgccggatacttatcttgaatacaatacagattttaaacatgacttttcattttaacgagaattaaacacaaaccgccaagtccgtacagcgcaaaatccgtgcaggcttgccaacggcgaaagtaatggaaaaagaataaaagttcccggagattttcataacccatattttttttgcaactttacactctcgaaaagtaaaacgaatatcaacgatatggaaaacagaagtttagtcactatcgccgaacacagcaaagagaaaattctctatatgctcaatatggcgaaagagttcgaggcaaaacccaacaggcatctgctcgacggtaaagttgtcgccaccctatttttcgagccgtccacccgcacccgcttaagctttgaaaccgccgccaaccggctcggtgcacgtgtcatcggctttagcgaccccaaagctaccagctcgtccaaaggcgagacactgaaagataccatcaagatggtaagcaactatgccgacatcatcgtgatgcgccactatctagaaggagctgcacgctatgccagcgaagtaaccacagtgcccatcgtcaatgccggagacggagccaaccagcatccctcgcaaacgatgctcgacctctactccatctacaagacgcaaggtacgctggagaacctgaacatctacctggtaggcgatttgaaatacggccgcaccgtacactccctgctgatggccatgcgacacttcaaccccacctttcatttcatcgctcccgaagaactgaaaatgccggaagagtacaagatttactgccgcgaacatgacatcagatttgtggagcacaccgactttacggaagagataatagccgatgcggacatcctttacatgacccgtgtgcaacgcgaacgcttcaccgacctcatggagtacgaacgcgtgaagaatatctatatcctgcgcaacaaaatgctggaacatacccgccccaacctgcgcatcctgcatccgctgccccgtgtcaacgagatagccctcgatgtggacgacaacccgaaggcatattatttccagcaagcgcaaaacggactttatgcacgtgaagccattctgtgcgatgtgcttggcattacgctggacgacgttaagtaaagtataaggaagtatattactggttttatttaggagacatgaaaaaacaagaattgcaggtggccgcattggaaaacggcactgtcatcgaccatataccctctgagaagctgtttacagtagtatcattgctgggactggagcagatgaacaacaacattactatcggtttcaacctcaaaagcaagaagctgggaacaaagggtatcatcaaaatagcggataagttcttctgcgacgatgagataaaccgcattgccgtagttgcccccaacgtaaagctgaacatcatccgcgactacgaagtggtggagaaacgtgaagtgaaactgcccgacgaattgcgcggcatcgtaaaatgcgccaatcccaagtgcatcaccaacaacgaaccgatgcctaccctgtttcatgtggtggacaaggagaactgcgtaatcaaatgccactattgcgagaaagaacagacaagagaggacatagagataatctgatgaaagaagactggaaaccgggaaccatgatttatccgctgcccgccgtactggtgagctgcggaagcaccccggaagaatataacatactgaccgttgcatggacgggaaccatttgtacaaacccgcccatgtgctacatttccgtgcggccagaacgtcactcctacgacatcatcaagcgcaacatggagtttgtcattaacctgacaaccaaggatatggcgcgcgccaccgactggtgcggcgtacgttcgggcaagaactacaacaaattcgaggagatgaagctgacacctggcaaaagtaccgttgtcagcgccccgctcatcgaggaatctcccttgtgcatcgagtgcagggtaaaggaaatcgttgccctcggctcgcacgacatgttcattgccgatgtggtgaatgtacgcgccgacacctcccacctgaatacggaaaccggaaaactggagctggcagaatccaacctgctggtttacgtgcatggcggctattacggactgggagagaaaatcgggaaattcggctggtcggtagagaagaaaaagtaataaataaaaattgattatgggaagaagatggttgcttttcggggtttgtttgctggccttctccacagccatgtggggacaactgccggttgtgcccggaacggataaaccggaacacccccagcacacccaccgccacgaccggcgggtgaacttcggtatcaagggcggatttacctcttcgctcttcctcgtatcggatttggtgctgaacggaacggtcatcgacgaggtgcagaataactataagataggttatttcggctcgttcttcatgcggataaacttcaaacgccacttcctgcaaccggaactgtcgtacacgataaaccgctgcaatatcaccttcgagaagccgctgcccgaagacgcgcccgaaagcagcatacccgaaatggcctctatcacctcgtctatccacagctttgagattcccgtaatctacggatacaacatcattaaggaagggccttacagccttgccgtattcggcggaccgaaaatacgctacatctgggacaggcagagcaaggtcactttcgagaatttcgaccagcgggacatcgaggaggaactctatccgctgaacgtcagcctcaccgccggcgttgctgtaacgatttcccgcatcttcttcgatttccgctacgacatcggactgcacaacatttcaaagcgtatcagctacaagccggtctatgacgaaaatgccggtgaggaagtacctcttgccaaccagatacgtttccacaggcgggaaaatgttctgagtttttcgcttggagtgttcttttgacaggaaatttcttacttttcttacagtttattcatttatttcttctaaatttgtacgttgtacgcttaataagagaatacagtattatcaaacctatctaataagcaagaatgaaaagagacgatttaattttcgatatcatcgaaaaagagcatcaacgtcagctcaaaggtattgaactgattgcatcagagaacttcgtaagtgatcaggttatgcaggcaatgggttcctgcctcaccaacaagtatgcagaaggttatcccggcaagcgctactacggcggttgcgaagtcgtagaccaaagcgaacagattgccatcgaccgcctgaaacagattttcggcgcagaatgggcaaacgtacagccgcactcaggtgcacaggccaacgctgccgtattcctcgcagtgctgaacccgggcgacaaattcatgggcctcaaccttgcacacggcggtcacctctctcacggttcgtcagtgaatacttccggcattatctacaccccctgcgagtacaacctcaataaggaaacaggacgtgtggactatgaccagatggaagaagtggccctgcgcgagaaaccgaaaatgattatcggcggcggttctgcctactcacgcgaatgggactacaaacgcatgcgcgaaatagccgacaagataggtgctatcctgatggtagacatggcacacccagccggactgattgccgcaggcgaactggataatcccgtgaaatatgcccatatcgtgacctctaccacccataagacactccgcggtcctcgtggcggtgtcatcatgatgggcaaggacttccccaacccctggggcaagaaaacaccgaagggcgaaatcaagatgatgtcccaattgctcgactctgccgtattccccggcattcagggcggcccgctggaacatgtcatcgctgcgaaagccgttgccttcggcgaaattctgcaaccggaatggaaagaatatgccaaacaggtgaagaaaaacgccgctacgctggcacaagccctgatagaccgtggctttaccatcgtttccggcggtacggacaaccactccatgctggtagacctgcgtagcaaatatcccgacctgacaggtaaggtagccgaaaaggcattggtatctgccgacatcaccgtgaacaagaacatggttccgttcgatacccgctccgcattccagacctccggtatccgtctgggtactcccgccatcacaacccgcggcgccaaagaagacctgatgctggaaatcgctgaaatgattgagaccgttctctccaacgtagaaaacgaacaggtcattgccgacgtccgcgcacgcgtaaatgccaagatgaaggaatatccgctgttcgcttactgattatgaaatcgggaaataatagtttctacaataaaaagtaaaaaagataagctgcgcagttcaaacgaaccttgcgcagcttattttttaattctctattttcaattctctatttaagaaggttcaggaaagcccctctatattgccgtccactatgtcgatgtgctccgcttgcggcactttgggcagccccggcattcggagtatctcaccggcaatggcaacgagcatttccgcaccgttgttgataacgatgtccttgatgtggaactcgaagttattgacagcgccgtatattttggggtcggcagagaaagaatactgcgtcttggctatgcagacgggataatgtgcaatacccatttcttcgataagcttcatcatcttgcgtgaagcgctgctgtaggtcactacacttgcgccataaaggttgcatgccactttctctatcttctgctgtacggtatcgttttccccgtaagtatattgcaacggggcggatggcttcttttcgattgtttccacaacgaggttagccaaatacaccgcaccttccccaccctcggcaaaggcattgttaatggcgaagcccactttcaaatcctcttcgcaatgacggcggatagcttctacttcttcgtccgtatcgctggcaaaacggttgaaggcaaccacaacggtctgcccgaaatagcgcaggttacggatgtgtttgtcaagattgccgaagccttccttcagtccttccatgttcggctccttaatgcggtcgaggctgacaccaccgtgcatcttcaatccctgtgcagtggcgacgataacggtcagcttgggttgcagaccgcttttgcggcatttgatattatagaacttctccgctcccaagtccgcaccgaagccggcttcggtcactacgtaatcgccgaaggtcatagccattttggtagcgagaatggagttgcagccatgcgctatatttgcgaacggaccgccatgcacaaaagcggctgttccttcggtggtctgtaccaggttgggatggatggcatctttcagcagtacggtgacggcgcccgccacacctaaatctttcactgtaaacggcttgccctcatagtcaaaaccaagtatgatattctcgatgcgtctgcggaggtcttccgtatcctttgccagacagagaattgccataatctccgatgcaggtgtaatgtcgaaaccggactccagggtaaccccgttggtacgtggtccaagtccggtaacaatgctgcgcagggagcggtcgttcacatcgagcacacgccgccagatgatttctttcaggccgaatccgtccgcctgatgctggtagatatagttatccagcaaagcggaaatcatattgtgagcggaagtgatggcatggaaatctcctgtgaaatgtaagtttatcttctccataggaagtacctgcgcgtagccgccgcctgccgctccgcctttcatgccgaagcacgggcccagcgagggttcgcgcaaggctacgatggctttcttgcctatcttgttcagtcccaatgccaggccgatagagaccgtggttttgccaatgcctgcctttgtggccgtaatggcggttaccagaatcaggttgctctgctttaccttctcctcgtcaatcaggtgttcgggaatcttggcaatgtagcggccgtagttctctacttcttcacggggaatgccgacactttcggcaacctgctttattttcttcagttcaatgctgcgtgctatttcgatatccgatttcatatatagggtcttttctttaaataacaactttgttttttttgaaagctgcaaaagtacaaaaaagaagggaaaatgcaggtatatgaaaaagaatttagtatcagcttaactacccgaacaggattggttatcaaacaatcatttgaaccgcgacgtatccactccttccctcttcttttccttataaccgccgaacttgtatgtgaacgatacgcccaactcgcggaaacaagagtaatggttggttacattctgcgtctggaagcggatacgcggagagatttgcccggtctcgaatatatcgttgcaatacagattcaggatggcctttcccttggcaaagccatagcgcaaggcggcatttacattgccggaaactggcaggtcgtaaattccctgaatcgctttgctgtgcacaaatccggtgacggtcagcttcaggtcgggcttggtggaaagggtaaaggtattgttcatttgggcaatgccgtaacactgcttgcggtcgaaggggatatcccaaaagtcgctgtctttctcgcgatgccatataccgataaaggtcaggcgggaattcaaccagttctttaccttaaagggcactgatgcctgtatgccaaactgttggcggtagtcaaagttcaggtatttatagatttcaaccagccgttgcgaggactggtaaagcgtctgtaccgagtagtccttggtgtggctgaaccaggtgctgaagatgtacttgccctttaagatatagttcatttgaaactcatagctttgcgcaggtttcagcagagggttgccgtgaatctcggaatatccgccgccgatataagaaacggcatcctgcacggcccaatagtcgggatagtgcttatcgctgctcagcgcaagttgcaggatatgtccgggggcaggcatatagttcaggttgacggtgggataccaatcccactggttccaaacgggcgttttataacgctccacagccagcgaggcatccagcgagagtttatcgccgaaactcttgctgaaacctgcatagatgttcagcgtttcttcccgtttgcgggatttcatattagtgaagttaccggcggaattatcaccggctgccaacgaagttgtattttcatctcccaactgttcgccggtctccgggtcgtagtaatattggtaactgttgtcgatgccggtggtatagacaataccgtaattcagtccccagcccttgcccaggctgtgttcctgcgccagaaacattttccagcggttaatgcgctggcagtcctgtgtaaagaagtcaagctcgtcgttttccagcaggcggctgttcagcaactggtcggacggagaacggtagtaagtgaactccacaccggctttcatgccgaaaggcgtggaatagtccagccggccgttgtgaagccagtcggtactgttgctcaacgtggcggactgctgcgaaccgttgatattcatccggttgtgagacgttgtatagttaccgttgtagacaaagctcaactgatggtctttagcgatagtataatcggctcccacccggaaactatgcgtatgcgaacgggcgcggcgtacctcatcggttgccatcgggtacaccgagccatccgccaaagcgtgcatagcatctttgtccgtcgtagtgtaagtacggccgtgtttgtgcgagtaaagaaaatccgttgagaatttatttccgttatataaaaggctggcacgctcttcaaaaccttcgtaatgcttctgattgtatttgccgtagagttcgccctgccaggaagagggaccgtccgcggtttgcttcagttgcacgttgataagtgcgccgcgcacctggtagcgggcgggtgcgttgtacatcacttcggctttttctatccggcttgcggggatactccgcaacagtgtgtaaagctgttcgacgctgagggtggtcacttttccgttcagaatgacggtgacaccctgccctgccagttgcaagccgccgttcatctcggttacaccgggaagctcctttacggcatcgtaggcattgtccacaggcaggtcgcggataagctgcggcaagtcatacaccagtttgccttgcgaggctttgactacggggcgttcgccgataatcatcacttcgggcaggctttggtagatactgtccaggcgggcatccgaggtaatgatgctgtcggcgctgagggtacgttctccgccggtgatttcctgggcggagatgccggcactaaaaaggctgattacagataacagataaaatcgtttcatacgtattcgatgctttaatttattgtatttgatgttttaattcgttttcacaccgcaaagtacggcattacccgcccgactttgtgttatcgcctgcttaccaagtgttatctactgttaccggaagtgttatttagtcttatcgcacgatacaccgcacaccataactccttatctttgcctgcacaaatatcaaggaaccaccatgaaactgcctttgaaatacattgccatactcgttatcctgtctttggcgggtatcttctcctaccaggcctactggctcggcgggctgtaccgcaccatgcgcaacgacctggaacgcaacatcatagaagccatgcgcatgagcgactataacgaaatgatgctgcgtgtggaaaggatgcgcaaggacagtgccgaccatgggacagtgagcgtatccgccggattcgagaaagacggaacgcaaaacaaaacctatgtacacagcaccaccagcatagaccgcaacggccggaaagaagaaacctccgaccagcaggtcattcatcaaaagagcgacacccttttgatgagtatctcggacaattcctccgtacaggctattatcacccgtgatggcatcgccgtcccggactccgacgatgtacttttcatagaacggaacaaagaccggaacaaggctcaatggctgaatgccgattcagcccaaaagaagctggaagccgccataaaagacaccgatgttccgccccaagccgcactgagggcaaacagcgggctggatgttattctgcgcgaccagaacagcatgctggaactcgccacatatttccagcgcggcctgcactccggcctggatgtcatttccgaccctgatgtccttgtatacgacagcctgctcacctttcagctcaaagaccggggcatcacgctgccccatcgcctggagcatatctatacaaacgacaaagcatctccccatacgtttacagacacgcttgccgtggccggtactcccggatacgttccaagccccgaagccaagctatacgagtacgctttcgacatcagtacccatcagagctaccgcctttggatggaacccgttaccccgttggtgctgaagcagatgtcgggcattctgactacctcgttcgttatcctcatcatcctctgcttcgcgttctggatacttatccgcaccatcttgcagcaaaagacgctggaggagatgaaaagcgactttaccaacaacatcacccacgaactgaaaacccctatcgccgtagcctatgccgccaacgatgccctgctgaactttaaccaggcggaagaaaaggcacaacgcgacaagtatctgcgcatctgccaggagcagttgcaacggctcagcggacttgtcgagcagatactctccatgagcatggaacgccgcaagaccttccgcctgcatccggaaccgctgtccatggaaagcattctcgaaccgcttatcgagcagcataaattgaaggcggagaagcccgtgcatatctctacggacatcgagcctgccggacttaccctcacggcagaccgtacgcacttcagcaacatcatcagcaacctgattgacaatgccataaaatactcgcccgaagcagcggacgtaaacatccgttgccggcaaaccgcctctgccgaacaaggagagtttgttgaaatcgccatcagtgaccgtggaacaggtatcgctcccgaaaagcagagccacatattcgataagttctaccgcgttcccaccggcaatctgcacaacgtgaagggctacggcctcggtctgttctatgtcaagaccatgaccgaaaagcacggcggaagcgtaacggtaaagagcgaaccgggcaaaggaagcacgttcactctgaggtttccgaacggataaaaggagtacccgcccgtttcccccggaagaaactccggtttcccttaaggggaacgcgcgtttcctttaaagggaactgtcgtttcccctaatgggaacggaagtttctcccggcggaaacggaagtttacttaggagaaacaggaatatatccccggagtacatacagatattacataaacaagaataacaagaaagataaggatgtcatggataaaataaaagtattgctggttgaggatgaagagaccctcgccatgattataaaggacacgctggaagggcaaagtttcattatccacaccgctgccgacggcgaggaggggttgcgcctgttcttcgacctgcgccccgatgtgctggtggcagacgtcatgatgccccgtatggacggcttcgaaatggtacgccgcatccgccagaccgacaagcacacgccggtgcttttcctcactgcacgctctgccatcaatgatgttgtagagggctttgaactcggcgccaacgattatctgaagaaacctttcggtatgcaggaactgattatccgcatcaaggcgctggcgggcaaggctttcaactttacggaacctgctcccaaagaagtcaccgactttgaaataggcaattaccggttcaaccccgtcacgcaacggctgtcgtatacaggaaccggtgctgctccgcacgccgatacggagatggaactctcacaccgcgaatcggaaatactgaagcgcctctgcgagaaccgcaatcaggtggtcaatacccagaatgtactgctcgacctctggggagacgacagcttcttcaactcccgcagcctgcacgtatttataacgaagctgcgccacaagctggcgcaagacgaccgcatccgcatcgtaaacgtgcgggggataggctataaactgatagtataaagaataagaaataatataaagaagtttcagaaaattgacggaaaggattatctttgtctgagaagaaaacaataaccgtgcccaatcatgaaacaagtttgtttttttatcatcgccctgctggcaagcgtcgtttcactgcacgcccaaaccgaagcgaagggcgacagcatacgctcccatagcctgcccgacggtacgccgcccgaagggacattcctacccgaaacgaagaattatgacggctttctcctggacatgagcctcatgagaatggaagctccccgcctgccccggtttacgttggaaataccggatgcaagcaaagactacagccggatattccgtctcaacccggacgcgacctactcgcaggggctttcaaatgtgttctcgctcaccaacgccaccgtttacagcatgaatccgtttgggctgacgggcttctggtcatcgccggagaacctgcaaatgggcagcttcaaactgaagaacggaatgcgtatcaatacatacggcgagtacgacaaggacggctggaaagttcccaaccgttcggcattgccgtgggagaagaacaacttcaagggagcatttgaaatgaaatccgccaacggtgcattcggcatacgcatcgaagtacagcagggcaaccggacgccgttctaaccgtaaacatcacaaactgatataatcagatacagcggttcgaccctaactaaagcataagctccggctctgccaatcctttctccttgcagtacgcatatactatttccagaatggtgtctccgtacttctctacccctttcttcccgaaataagggatgcggacaagcatgtccttatcggcaggcaacaggttgctgatgcccaaaatggccttttgctggatgaccgtgtagaccggcagccccaaacgggctgcttccgtgtttctccaagccaccaggcggtcgtatagttcgggatgcagtacgtccgaaggcacttgaacggaagatgccgccgtttctttccttttgcggtcctgcatgttcttctccactgtatccagcatgcctctccgcttcaggtcctctttgccggagacagcatgctcgccgatagacagtatggctttccgcttcaaatacccggctgtgctgaatccgtgttccgttatgtatgccagcagtctgtttttcaacaggaaaagagtattcaaatcctctttggctgcgttcagttgcttcttcagcaccttattatccgtggcaagagcgcgtggccctattaatacgggatacaaaagcgccatttcatctttaaagtaaccggctcccgcaacaatccgctcctgcagggtttcgtccgcagcatagtcctgtgcggcgtcaatcaggcggttgtactgtatgccgaacctctgcgccacttttaccaccttttcgcggaaacgctccgccgcctctttgtaggcggcaagctgcttgggatagagtttataaagatgttcatcgaccagccgtacatagcgctgcaacgcttgtgccagcggcaggaaatcaaacagttccgacagcagcccgtgaaaataggcacgttgcagtgaatggaagcggttttcgtccggttcgttccggcgggcttcttccgtaaaccggtctacggcacggtcgctgataacagcctttgccgaaagcggtgcgctgagcaccaggccttccagcgtcttgcaacggctcagtgccacatacgtctgcccatgtgcaaaggatgcgctggcatcgataatggcacgctcaaacgtaagcccctgactcttgtggattgtaatggcccatgccagtttcaggggaaactgccggaaagtaccttcaatatcttctacaatctccctgctgtcttcgtccaagacgtattttgcattcgtccactcctcttcctgcaacagaaaagtatccccgctgtctttggcgcgtacctcgatactgccggcagaaacggaggttacctcaccaatcataccgttgtagtagcggtgctcgccggaggagtcgttcttcacgaacatcacctgagcgccttctttcagttcgagaacttcgtccgtggggtatgaatattcgggaaacttcccctcgacagtagagcgaaacgcataggtacgtcccggaagctgttccagctcgtagctgttgatacgctgcgcctgatagttatgggtgaccagacggatatatccttcctctttccgaggctggaagccggggagatagcggcggttcagcgtttccagcacctgcggatcgcaatggttctcacggatgcggttcagcagttccaggaagtctccgtcattctgccggtatacggttttaagctcgatggtgcaatattccgtctgcttcagcgcgcggctggagaagaaatagggagtgtcgtagtacttgctgagcatctgccattcctcgtctttcaccacgggagccaactgctgcaggtcgccaatcatcagcaactgcacaccgccaaacggtttgtaggggtcgcggtagcggcggagcatttcatctaccgcatccagcaggtcggcgcgtaccatactgatttcatcaatcaccagcagatccatgctgcgtatgatattgattttctccttaccgaaacggaagcggtagcttgcctttccattcgtgctgaacgagctttcgggcacataaggtgcaaacggaatctgaaagaacgaatggatggtaacacccccggcattgatggccgctatgccggtgggcgcaacgactaccatacgcttgggactttcctgcttaagcttacgcaaaaaagtcgttttaccggttccggctttgcctgtcagaaaaagatgagtgcctgtgctttcgatgaattgccacgcaagcgctgattcggggttctgctccattgttcttttcggtttattttagaacggtaaaggtagtacaaataaaccaaggaaaagaaaaaccggccgaatgttttttgccgcacggacggcatccttaaaaaaagagaatgtgtgtcaaaactaaagtccgcttactattggtttcttttttaggcacggattacacggaaaacacggatttcacagaaaaagaataaagaaaatctgtgaaatccgtgttttccgtgtaatccgtgcctaaaagaaaccgtcaagtgtattttgacacatctccttgtttcctgccggaaaaattatttcatacttccgccaatgatgtccagcagctcattcgtaatcgcctgctggcggctcttgttgtattgcttcgtcaaatcctgaatcagctcattggcattgtccgtggcagcctgcatggcaagcatacgtgccgcgtgctcggaagtgttcgaatccaacaagaccgtataaatcttctggctcaacactttaggaagaagctcggccaccagttgggaagcagagggctctacaatataatcattgttgaaactgctttttccgacagtcccggttgcttcttcggctaccttgcccaagtcgatgggcagatagttgtctctcgtcagcacctgcgagcccatagacttgaaatgatgataaatcagctccaccttgtcgatgcgcccttcaagaaactctttcatcaggcgcccggcaagctcgtaagcctgcacatacgaaggcttgtcggccatttcctgataactgccttgcggctcatatcccaatttctttacagcttcttccactttcttgcctacgggatacaccaggatattctccttgcccagcgaccggtagtcttccagtgtacgctccagcatctttgccacgttggagttgaaagcgccgcataaagatgaattggacgagaatgccacaattgccaccttccctaccggacgctcctcggtatagggagactctaccgtaacatccgtactcaggaagtttgtcagaatctcgttcagcttccgttgatagggcagcatattctcaatccgcccctgtgccttatgcagcttggcggacgccaccatcttcatcgccgaagttatctgacgcgtactcttgacggagcttattctattttttacctctttcagtgaagccatttcatatagtgattaggggttagtgattagcggttaggggttgcctaactgccatctacataaattgcttggctgcctttgccgccgtctcttctatcttcttgcagacattgtcatcgatgacacccgacttcaacacatcgagcacctccatctgataatctctttcaaggaattcgaggaaactgcgttcaaactcattcaccttgtccaaaggcacatccttcagcaaaccgtgcgtgccgcaataaagaatggcaatctgcttctctacaggcatcggactgtactggggctgtaccagcaaacgggtattcttctggcccttgtcgatggtgagcgcagtaaccgggtccatatcgccgctgaacttggtaaatgcttccagttcgcgatactgtgcctggtctatcttcaacgtacccgccaccttcttcattgccttaatctgggcgttaccgcctacacggctcacggagatacctacgtcgatagccggacggttgccctgattgaaaaggttggtgtcgaggaatatctgtccgtcggtaatggagattacgtttgtagggatgtaagccgacacgtcgcctgcctgcgtttcgataatgggaagcgccgtcaatgaaccaccgcccttcactctgcctttcaggctttcgggcaggtcgttcatctcgcgtgccacttcttcctggttgataatcttcgccgcacgctccagcagacgggagtgcaggtagaagatgtcgcccggataggcttcacgtccggacggacggcgcaaaatcaaggatacctcacgatacgctacggcctgcttggacaggtcgtcatagacaaccagcgcatgacggccggtatcgcggaaatactcgccgattgcagcaccggcaaacggggcgtaatactgcaacgcagccgggtcgcccgccgtagctgccacaacgatggtgtaatccatcgcaccgttctcgcgcagtgtatttacgatagatgctaccgtagaacctttctggccgatagctacgtagatacagtatacggggtcgcctgcctcgtagttggcacgctggttaatgatggtatcgatggcaatcgcggtcttacccgtctgacggtcgccgataatcagctcacgctgcccgcggccgataggaatcatggcatcgacagccttcagaccggtctgcaacggctggtttaccggctgacggtaaataacgcccggagctttacgctccaacggcatttcgcaaagctcgccgcctatcagccctttgccgtccaacggttcgcccaacgggtcgataacacgtcccaacataccctcgcctaccataatggaagcaatacgcttggtacgtttcaccacgaagccttccttgattttatccgtagggcctaacaacacagcacctacgttatcttcttcaaggttcatcacgatggctttgataccgttgtcaaactccagcaactcgttcgcttcggcattacgcaacccgtagatacgcgccacgccatcgctgacttgcagcaccgtaccgatttcgtccagttgcacgcgggtgtcgatgccttccaactgtttgcgcagaatatcggatacttcgcttacttttatattttcagacaacattttatttagcaattaatgtttagtgattaatgatcggtattcggttatatcactaaccactgttatacaattcttctgttcttatcaatgaactgctgtttcactctctttagctgggtagcaatactggcatccagacggaaatcgttgatgtcgaatatgaatccgccttcgattgaagggtcaacatcggtctgtaactccattttggcatgtagcaaatgggaagcgctatttcggatgcgttcccaaatctcacgacttacgggtacggcagtcgtcagtttcgctacaccgatatgtctgctctttctgtataagtccagatagctcaaacagatatattgcagaaatgcctcacgcctgttttttaatatcagcgtaacgaaacgggacaattcctgcccggcaggagcatcccccactgctgcggtacagataagcgagaatttctcctgtaccggcagtacagggttctccaatgccgcacgcaaatcagaatgcttctcgaaactcctgctcaacgtgcgcatttccgtatacagcctgtcttccgtacccgtgctcttggcatactccatgagagcctttgcataccgcatcgaaacaattcctatatccatttttccaaagattaatgattagcgattggccgtcagcatttcatccagcatacggtcaatcatttccatctggtcttgctctttgtccagattatgacggattatcttctccgcaatatctaccgatagtacagcaacctgacggcggatatcacggatagcttcttccttctcttgctgaatctgctgtttcacatcatccagctctttctgtgcaagggcttcggcatgtttacgcgcctcgacaataatcttgtcacgctcgtgcattgcttcccgcatgatgcgcccctgctccttgtttgcagcagcaatcaacgcatcactctcctctttcagtttggcgagctgggcgtttgcctgacgtgccacttccagcgactggtctatgtaggccctacgctcttccaccattttcgtaatgacgggaaagccgtatttggccagtaccacaaaaaccacgccgaatgaaaggagcatccagaacagcagaccactatcaggtaataacaatgacataatttattttttttataagaagaataccaacagacacacaacaaccgccaacaatgcaacaccttcaatcaaggcagcggcaataatcatgttcatacgaatatctcccgatgcttccggctggcgtgcaatggcttccatggcagaactaccaatcttgccaatacccatacctgcaccgataacagccaaaccagcacccagggcagcgcccaatttactaactccaacacctgccgcagcagcttgcaataatacagatagtaacataactttcaaattttaaattgttattttattaatgtttatattccagataatcttatcattttctcattttattgccttcttctcaccggctttctccgtgtgctcttcctgtgccagaccgataaacaccgccgacagcatggtaaatacatacgcctggataaaggccaccagcaattccaatccgttcataaagatattgaacagcaccgaagctaccgtcagcgaaccgttcaaggcaggtcccatacttgccgatatgaatatcaggcacgtaagcaccagcattgccatgtgtcctgccagcatattggcaaaaagacgtatcatcaaggcaaacggcttcgtaaagattccgaagaactcgataaacggcatcatgggcacaggcactttcaaccaccagggcacatcgggccagaaaatatctttccaatatgtcttggttccgaaaatattaacggcaaggaatgtgcacacggccagcaccattgtaattgcaatgttaccggtgacatttgccccgcccggaaataccggaatcaatcccataaggttgtttatgaagataaagaagaacgcagtaagcaagtaaggggcaaacttacggtacttcggtcctacacagctctttatgacatcatcattcaccatcataatgaacatctccataaacccgacgaaaccgcccggagccgcactgtcctgaggatgcctgcgataccagcgggcaacgctcagtacgatgactatcaataatacactgttgatgagcaatgccagcgtaaccttcgtaatggatatatcccacggacgcacctcattgcctgctgcatcatgctccaccagttttccttcgtacttgctgccttccggagcaatggaaagtccttcgtaactgcctccgttctcctccagacgggaagaaaggaatacgtgccaccccgttgtgccgctatatacaatgacgggcaacggaatgataaccttcgtttctccgaaatcggtgatgtgccattcgtacgaatcgccgatatgcccgaacacgatttcctttacgtctaccgtattctcctcttgctcggcaggagtcacatcgtcacgttgggccatgctgtcgagttcggccacaaggccgttttgcgctgcgggaatactgtcggcctgcatagaaacggcaggtaatgacaacccacatgccagcaatactccggttagtatgttacgcaattgtttcattttcttgtctctttttctttttcagcttccggttcacttcaaaagtgaagaaaaaccaggagtcataagtcaaatatatcagatagttagcgatgaacgtcaacaggaactcttttgcttcctcacgcactgcaacgcaatacaccagcatcacaatgatagatgcaagcatccgcataacacgcatcagcaggtatatctgcaacatccgccccggcatccggtaacggcagctttcaaccatgtttatcataaacacgccgaaaacaaggaagaaggcaggtatcagcggataaccgccgaaatagtggtgcgggaataccgaataataaacccatccgcctatgccgcccaccaataccgttagaagcgccacttgccacaaatagttccgttttgttatactcacatcaatccgatttaaggttggtaatcaaaaagagtcagtctatacaaaccgaaactctgttgctgttcatctctacaaaaccgccatgaatatccagtgcacgttcttcgccgtctttcgttacataagccagcgtacctgccttcaacgacgatacaatgggtgcatgttgcaccagaatagtaaacgagccaagcgtacccggcaatgttacactatctacttcgcctgtgaagatttccttttccggcgatacaatatccaaatgcagtcctttcatctttatagtctactgaatttttatttctttgcctgttccagcaatttctttcccttctctattgcttcctcgatagtgccgacattcaggaaagccggttcgggcagataatcgacttcaccgtccagaatcattttaaaccctttaatggtatcttctatagagaccattgtaccgggaactccggtaaactgttcggccacagcaaaaggctgtgacaagaaacgttgtacacggcgggcacgattcaccaatgtgcggtcggcatccgaaagttcttccataccgaggatagagataatatcctgcaactccttgttgcgttggagaatctgctttacgcgctgagctacttcgtaatgctcctgacctacgatatgcgggtcgagaatacgagaggtagactccaacgggtcgacagccggatagatgccaagttcggtaatcttacggctcaataccgttgttgcatccaggtgcgtgaaagtagtggcgggtgcagggtcggtcaggtcatcggcaggaacatatactgcctgtacggaagtgatggaaccgttgcgtgtagaagtaatgcgttcctgcatagcacccatttccgttgcaagtgtaggctgataacctacggccgaaggcatacgtcccaatagggcagacacctcggaaccggcctgggtgaaacggaatatgttatcaatgaagaacaatatatcgcgcggaccgttcgattcagaccccatgtcacggaaagattcggctaccgtcaaaccggacaacgcaaccgactggcgcgcacccggcggctcgttcatctgaccgaatatcagggacacctgcgatttggccacttcgtcatagtccactttggaaagatcccaatgaccttcttccattcctttcttaaactcttcgccataacggattacaccggattcaatcatctccctcaacaggtcgttaccttcacgggtacgctctcccactccggcaaatacggaaaaaccgttctgcttcttggcgatattattgattaactcctggatgagtacagtcttgcctacacccgcaccaccaaacagaccaatcttaccgcccttactgtatggctccagcaggtcgataaccttgatacccgtatagagtacctcttgtacggtagtcaaatcttcaaatttagggggttcgcggtggataggataagcaccagtacggtccagttctttcattccgtcgatagagtctcctacgacattcatcagacggcctttgatttgttctcctatcggcatagtgatcggtccgcccaacgggtaaactttcatgcctctctgcagaccatccgtactatccatagctacggttcttacggtattttcaccaatgtgctgctgtacttccacaatcagccttttaccgtgattctttcttatttccagtgcgtcgtgaatgcttggcagcatcagctctgcctctgttccttcaaaatagacgtctacaacaggtccgataacctgagagatatgtccaacaatctgtgacataagcaatctttttatattctattttcctaattatttccagtaaaattgtaagtcgctgcatggaatcttccatcagtcatgtcgcgtctttcatcgtccaaattcacttgctctactaacattcgcgccagactgtttgttcattcaaaatagttacataaacaacttcgcaaatgtataaacaaatcacgtctaattgttctccttaaaagcattttttctataaattacactattttgaacgattaatactacaatgggaacaatttgttccacacataataacgttggttaacaatcggtaatgcacctaatcataaaaagccatccgtattctcctaaaaaataagccctgtctcgcgacaaggcttattcacaacacaaacacaaaataaaacacgacaaaactactatgcaatcttacctgtctatgccggggaggcatatgtactaattacggatattcacatatacataagcagcatcaggccgatttgcatgtaataaacaaatgcggggaagcatttgtttattttctgtatgttaaaaagttcaaaatcattattcttattgaatacctctctcacgaagcttcaactgccagttccatgcagagcgtaaagtatcttcaatacctacttccgctttccagcccagctcttcgtttgccagtttcggatcggcccacacctttactatgtctccggcacggcgacctacaatctggtagttcagcttcacaccggttgccttttcaaacgcattgatcaattccaatacggaaagaccgcgtccggtaccgatattgaacacttccactttttccttctgtttcttctccagaatacggcggatagctacaacatgagcctttgccaaatccaccacattgatgaaatcgcggatacaggaaccgtcaggagtatcgtaatcgtcaccgaatacactcaatttctcacggataccgatagccgtctgggtgaggtacggtatcagattctgcggcacaccgttaggcaattcaccgagcagtgccgaaggatgggcgccaatcgggttgaagtaacgcaacagaatcgcattgatgggagcaccggaagcaaccgtatcacgaacaatctcttcgttgatttgcttcgtgtttccgtacggggattctgccttcttgataggagcctcttccgttacgggaagatggtcgggctggccgtatacggtacaggaagaagagaatacaatgccctctactccatgcttaggcatcagttcgagcaggtttatcaaggaaaccaagttgttgcggtaataaagcaacggtttttccacagactctcccaccgccttgcttgccgcaaaatggataatagccttgatacctttatatttagcaaacacagagtcgagaccggcgtaatccaggcaatccaatttctcgaatgcaggacggatgcccgataccttttcaatgttgtctacaacatctgcgctggagtttgacagattatcgataataacgacttcataacctgcgttctgaagttctaccacagtatgagaaccaatatagccggttccgcctgtaaccaagattttctctttcatattaatatagataatttagcttttaggttatcattaggctacaaatgtaaggaaataaattcataaagcacgtacatgaccggtaaaaattaatcaaagaatattcacccctgaccgtgtacgataactttgcccataaaagacaaagcgaagaaaccgccctcttcttttacaaagagaaccggttcttcgctttagcttaaattcagagtatatcttagagcttaactacgccggagaagcccatgaatgccatagccagcaaaccggcagcaatcaaagctatcggagttccctgcatgcccttcggcacgttcaccagactcatctgttcgcgcagacctgcaaagagcgtcagcgccagaccgaagccgatagccgtagagaatgcataaaccacaccggtcagcaaatcataatctttctggataacgaggatagccacaccgagaatacagcagttcgttgtaatcagaggcaagaacacacctaaagcctggtataaagaaggagatacttttttcaggataatctccaccatctgcaccaatgcggcaatcacaaggataaaggtgatggtttgaagatagcccagaccgaaagcatcgagcacaaacttctgaatgaggaacgttacgattgtagcaatagtaagcacgaatgccactgctgccgacatgcccaacgccgtctccactttcttggatacgcccagaaacggacagatacccaggaattgcgacaacacaatgttattgacaaagattgccgagataaatatcaatatatattccataatatcaattctaattatgaattacaaattatgctttcttgaagctgttaaccaacgcaatgaggtatcccaaagcaataaacgcacccggtgcaagaacaaataccaacataccgtattcttcgggaagaatcgtgaggttgaatatcttgcctgtgcccaggaattcgcggacagcacccaataaagtcaatgcgatagtaaaacctaatcccatacccaaaccatcgaagaaggatgccactggattatttttggcagcaaaagcctcggcgcggcccagtacgatacagtttaccacaatcagcggaataaacaagcccagtgtcgcataaagtgcgggaacgtaagcctgcatcaccatttgcagcagtgttacgaacgatgcgattacaacaatgaaagaaggaatacgcaccatatccggaataaggttcttgatagcggaaatcaccacattggaacagataagcacgaacatcgttgccagtcccatacccataccgttgatagcagatgaagtcgtacccaatgtaggacacataccaagcaggagtacaaacgtaggattctcttttacaatcccgttcatcaatactttaaaattattcatatctctactcctttcttatttagcactgacagaatcagtgagttcaactttaatagtagctcccgtagccgtatttgctccggcagcctcttccacattcttttgagtagctcccgtagcgccgtcagcggtattctgacctgcataggcagcatatgcaacgtttacggcattcaagaatgcgcgcgaagtaatggttgaagctgtaatggcgtctaccttaccgccgtccttgcttacagtcagagaagcttcaccgggattcatacctgtaatatctcccttgtttcccttcttgaaccagtcggcagccttggagcccaatcccggagtttccacatgcgacagcagcgagtaatcgataatcttgccttcggcatcgaagcctaccaataccttcagctcaccgccaaagcccatggaagtcgcttcaacagcagcaccgatgaatttgccttctttagtggcgggatacacagcgtactggacaccgtttacctcctgagtctttttttcggcaatcgggtcattgtcaaaacccggaaccacggcgctgacagcatcgctcaacgtcttggcattggcctgcgcaataggttctttcgtcagttcatttacataagccagcaatgctacggatatcgcagtaactcccgtaagcaccagcaacatattctttaaggatgattctaactttttcatttcttcttcgctacctccccaaagcgtttaggtttaacatatgtgttgataagcggagtaaacgcattcataatcagaatagcgaacgacataccttcgggatatgcaccgaacagacggatgatgaccgtgagcagaccgatacatacgccgtaaatcagcattcccttatggctcatcggagaagttacataatccgtagccatgaagatagcacccagcatcagaccaccggacagcagttgcaccaccggagatacatagatttccggattaacccagtacatgatgccggagaaaacgaataccgtagccaaaatggatacgggaatgtgccatgtaataatcttcttccacaacatataggccagtcccaacagcagggccaatgcgctgacttcacccagacaaccgccgttattaccgatcagcaagttgaaagatgagggaaggtcgctcaaagacatgcccggagcaccgctgattacacctttcattatagccaacggtgtagcagccgtagtggcatccgtgtaagcggtcagttgtcctacggcaggccatgtggtcatctgcacagggaacgacagcaacaggaacacacgtcccgccaatgccgggttaaaaggattacaacccaaacctccgaaagacatcttgcctacaccgatagcaaacaaggcgcctagaatgataatccagacaggaagattggaaggtaagttgaatgccagcaacacaccggtgataatagcggaaccgtcacagatggttgtggtttctttcttcatcagaaatttgccgatagcccattcaaagaacagacaggctgctacggaagtagccgtaacaatcagcgcgcccagtccgaaaaagtaaagcgatacaagaaatgcaggaatcaatgctatcagcacgccgtacatattcttctgcacgctgtcaccgccgtgaacgtggggcgaaagggatacgattaatttattcataagattatactaaatcaattctttcatttttttacctgacgtgcacgtatcatcgctcctaccttacccttacccaaacggatatagtccagcaacggacggttggaaggacaagtgaactggcatgagccacactcgatacacgacatgacatcttctttctctactctttcaaaatcgccgtgagccgatacggtagcaagcaagtagggttccagccccataggacaggcactcacacatttggcgcaacggatacatggctgcacctcaccgcgcttggcttccttatcgttcataatcaggatgccggaactgcctttcgcagtcggcacatccgtatttaccagcgccttacccatcatcggaccgccgccgataatcttgcccgtatcttcgggcagaccgccgcaagcgtcaatcaactgcttcatcggcgtaccgatacgtgccaggaagttggaaggcttggacaaagacttgccggtaacggtaatgacacgctcaaacagcggtttattcttctgaacagcctgatatacggcaaatgcagtacctacattctgtacaacggcacccgtggagataggcaatgcaccggcagcgacctgacgactgataacagcgtctatcaactgcttttcaccgccttgcgggtactgtactttcaagggcacaacctcgataccggcatagccggcagctactttcgtcatcagctggatagcatcgggcttattattctcaataccgatgaatgccttgttcaccttaacggctttcatcaggatagaaacacctaccatgatttcttcggcatgctccagcatcaactggtggtcggcagtaagatacggctcgcactccacggcattgattatgacacattccgccttgaatgcaggcggcgggcacaacttcacctgtgtaggaaaacaagcgcctcccaaacctacgataccggcatccgcaatcttcttcacgatttcctcggctgtgagattgcactcttttaccaatgtatcggtacggtctatggtctcttcccactcatccccctctacatcaatgaatacagccggtttggcgtatccgctggcatcgacgatagtgtcgatttttgcgacctttccgctgacagacgaatggatagccgctgatacgaagccgccgggttcggcaatctttgtacctactttcacaacatcacctttagcaacgataggctttgcaggagcgccgatatgctggctcaacaagataacggcttttgccggaatctctgcctgtacgataggctgatgtgctgaaagtttattttcgtgtggatgaactccaccgattgaaaatgtcttcaacatacaattctgtatttttagtcgtttaatttcttttaatattatgcttcagttttcggagcagcagtttcagaagctttggaagtttccgctgtttttttaggagcttctgcgggctttgcaggagtttccaccggcttcttcgcagcttccgcaactttcttcaccggctctgcaaccttgggagcaacagcctctccttccgctttcggtttacgcggcgggaaattgagggcgattatcgtaccttgcggacaaacttcttcgcatttacggcaagacttacatttgttcgggtcgatgtatgccaaattgttctccagcgtaattgcctcgaacggacatacctttacacacttgccacagccgatgcaggctacagtacaggccttacgggctacagcacccttatccttgtttacgcactgcacataaacgcggcgggatttcttgccttgcggacggatttcgataatatttctcggacaagccttgacacatgcgccgcaagcagtacacttgctttcgtctacctcaggaagtccggtttcgggattcatgcggatagcaccgaactggcaggcagacacacagtcgccacaccccaaacagccaaagctgcatcccgtttcgccaccgtaaagagaagctgcgatagcacagctcttcgcaccgtcgtattgattgacacgagggcggttggcacacgttccgttacatcttaccactgcaaccatcggttcggcagcagcagcatccaatcccaggatttcggcaactttcgtcatgacaggctgtccgcccaccggacaaagtttaccttccaacgaacctgccttgacgcaagcatcggcaaatccgctacaacccgggtaaccacatccaccgcagtttgcctgaggcagcacggctgccacttgtgcaattcgcggatcttcatacacggcaaatttcttggaagccacgtaaagaataaccgccgcaaccagcgctatggcccccaatgaaattactgcaatcagaattacattcataaattagttgtttattaattatttgttttatgtattagttagttcatcggtttaatcgagaaagagaacttctttcccaatcgcgacttgttcagccacaatatgtaataataaggtataaggagccctaacgaacacagtgcagagaccagttcgtcgtgccacatagccataaaagcaaaaagggaaaagattaaaacaagaaaaggaaacacaaacgcaaacaaaaccgccattacccccatagacaattctccgacaacccatacacggtcgccgggctgataagaagaactttcatctataacatcgataagcttttcttttgtatcggcagaactgcaatgtcccttgatactgcatgaagcacatgctgaagtttgaacaatcctcacctgaagatgagtgccgtttatgttttccacaataccctgatgtcttatagtatccgccattttgcaaagtgtgcattacaaatcgcggcaaatttacgcattatttgcgaactgcaagggattagagtgctttttctgtgtacgtaaacgctctttttcctatttttcgcagtttttcgctattttttcttctgaaaaacaaaaaagagcgccccgctgtcagcggagcgccccctttaatcattcgcaacagatatggttaccatttgtaattgataccgaagctcaacaattccttcacctggaaatagctgtcgccttcggtcggtttggcactgtcatcaaaacgggcatgcacataaagtttggtggagagataacggttcagcacaaaattaatggtgttttcccattcaatacgtgtccactcgtaactggtctggaagtccaaccgtgaatccagaacgatagaaggtatgatagtccacgaaagcgtaggctgtatttgagaaccgaaattatgcttgacgcacttaccctcgtccaggccgaacttcacttcgtccacctctttattgcccacatagcgcaacatataggtcagcggagcgataaaaacagacaagttaaacttttcttttttcagcttatagtccataccgatactggacgaccaatctgcgggtgcaaagaatgctgagaccagctcttcgctattcgccttgtaactatggcaaaactgtgttttaaattccgtagtaatagtataataccacttggatgcagcctgaatacccaatttgctataaaggcggaactggtcggtacttaccaggtaatcgtggaactcatcggaaggagctgagttgaaaccgaacttggcatccagcatattctcccactggagtttctccctatcgttatagttggcaaacaactgcaggttggcaagcaaggagttcgtactttcaccgcccttataccagttgtcggaaatatagttttgcgtaatctgcaacgaaccgtttccaccggtcacccaccagttgggcttttgtatcacgacttccgcctcttctttcactcttgccatgttctcctgggcaaagagtttcaccacggaaggcttggaagagatttccttttcgatattgtccttgaaaagttttttctttttaatctctttctcggtcattaccaccaagtccggacgattgacgtacgtattcatcatcacacggtccacaaccctattcgcattctctttcgacaagaagctcaatgtatcgaacggcaagagctctttcgtcatcgcaggtacagtatccggcttctggaaagtccagccaacctgcgacaggcgttccataggagcataataataagtggtgggaacaaacatacggtaatagtccggattgtatgcaatataccgttcgggagtagccggatcgttcaaataatccaacaccccgaaatatttttcatacagcacagagactgtatccaaccggtacccgttatcgcagggtttcagtttcaatatccaattctggctccaaatacccgacaatgtatccgcattctccgttgcagcccgctttcttgtactctttgcagcattctgggctatcaccggaaaagaaagcagtgcggcaaccaatcctattaaaaaacgtctattcctcatacttttcttaaaatctatatttgaacgcaaaattaaatcaaaatgttcagattacaaaaggtggaaagtgaaagtttatcagaaccttattacgcacagatattccactttttataattgttttcaccaaactgttatgtacttcctcttttttttcataattttgcgctttaatttttagagaaaacatttaaaaacagtatagctgtgggagaaacaaagtatattttcgtcaccggtggcgttgcctcttcattgggcaaaggtattatttcgtcatccatcggtaaattattgcaagcaagaggttataaagtaacaattcagaagttcgacccgtatatcaatatcgacccgggtacgctgaacccttatgaacacggagaatgctacgtaacggtagacggccatgaagccgatctcgacctgggacactacgaacgcttcctgggtatccagaccacaaaggccaacaatattacaaccggacgtatctacaaaagcgttatcgacaaagagcgccgcggcgattatctgggaaagaccattcaggtaatccctcacattacggatgaaatcaagcgtaatgtaaagctgttgggcaacaaatataaattcgatttcgtaattaccgaaatcggtggtacggtaggcgacatcgagtctcttccgtacttggaaagcatccgccagttgaaatgggagttgggtaaagacgccttgtgcgtacaccttacttatgtaccctatcttgcagcagccggcgaattgaaaaccaaaccgacccagcactccgtaaaagagttgcaaagcgccggtatccagcccgatgtgctggtactccgcacggaacatgagttgagcagtaccttgcgcaagaaagtggcccttttctgcaatgtagacgaaaaagccgttgtacagagcatcgatgcacctactatctacgaagtgcctattctgatgcaggctcagggactggacgaaactatcctgaagaaaatgggacttcccgtgggcgatactccggggctgggtccgtggcgcgctttcctcgaacgccgtcacaaggcagaaacgaccgaaccggtacacatcgcactggtgggcaagtacgatttgcaggatgcctacaaatccatccgcgaagccctttcacaagccggaacatacaatgaccgcaaggtatccgtagatttcgtaaacagcgagaagctgacggacgaaaacgtagcggaagcattgaaaggcatgtcgggcgttctcatcggaccgggcttcggcgaacgtggcattgccggaaagttcgtagccatcaaatatgcgcgtacacacgatattccgacattcggtatctgcctgggtatgcaatgcattgccattgaatttgcccgcaacgtactgggatacgctgatgccaattcgcgcgaaatggatgaaaagacaccgcacaacgttatcgacatcatggaagagcagaagtccattaccaatatgggcggcacgatgcgtctgggcgcttacgaatgcgtattgcaagaaggcagcaaagcctacgaggcctatggcacggaacacatacaggagcgccaccgtcaccgctatgagttcaacaacgcatataaggcagagtatgaagcggccggcatgcagtgtacgggcatcaatccggaatcggacctggtggagatagtagagatacccgccctgaaatggtttgtcggaacccagttccaccccgaatacagcagtaccgtactgcacccgcatccgctatttgtagctttcgtaaaggctgcgattgaaaacgaaacaaagtaatcatcactaattaataattgaaaattcatatttgattaaatggataaaaacaccatcacaggccttgtcttgatagcaatcctgttagtcggattcagctttctgagccgtccgagcaaggagcaactggctgcacagcaacgctattacgactccatagcccaagtacaacaacgcgaagctgacctgaaagcaaaggcggaagctgccttggccaatgacaaagaggaacagacggcagactctaccgctctcttcttcaacgctcttcagggaaccgactcacaggttacaatacaaaacaatctggcagagctgacagttgccaccaagggcggacgtatttcgtcagctacgttgaaagagtatatgggacaggacaaaaagacacctgttaccctattcagcggcaacgatgcttccatgaacttccttttctacaacaagaaggaaaccatacagacggaaaactactatttttcggtggtgaaccgtacggacagcaccgtaaccatgcgtttggcggcagacagcgccagctatatcgactttaagtatgccatgcacaatgacacctatctggtagactttacaattgacgccgtaggtatggcaaacaagctggcaaacaccgactatgtagacatcgaatggtcgcagcgtgcacgtcagatagaaaagggatatacgtatgagaaccgcctggcggagttgacctataaaattaccggagacggaaccgattacctgtctgccggcaagaacgatgagaaagaagtggcagaacgcctggactggattgctttcaagaaccagttcttctcttccgtattcctcgccgatgccaactttgagaagacgaagctgaactcaaagctggagacacagggaagcggctacatcaaggattactctgccgaaatgagcactgctttcgacccgaccggcaagactccgacgcaactgttcttctacttcggtcccaaccactacaaaacgctgaccgcgctcgataaaggacgcgagaacaagtgggagctcaaccgcctggtatatctgggctggccgttaatccgctggataaacaaatggttcaccatcaacatcttcgactggctgtccagctggggattgagcatgggtatcgttctgctgctgatgacattgattgtaaaagcagtggtatttcccgcaacttggaaaacgtacatctcctctgccaaaatgcgtgtactgaaaccgaaaatagacgaaataggcaagaagtatcccaagcaggaagatgccatgaagaaacagcaggaagtgatggcgctttacagccaatacggcgtgagtccgatgggcggctgtctgccgatgctgattcagttccccattctaatggcattgtttatgttcgtgccgagtgccatcgagctgcgccagcaaagtttcttgtgggccgatgacttgtccacgtatgatgcgttcatcaatttcccgttccatattccgttcctgggcagtcacctcagtcttttctgcctgctgatgacagtaacgaatatcctgaacaccaaatttatgatgcagcagcaggacactggcgccaacccgcaaatggcagccatgaaatggatgtcgtacctgatgcccgttatgttcctgtttatattgaacgactatccttcgggactgaactactactacttcatttcgacgcttgtcagtgtggtaactaccatcatcatgcgcaaaatgacgaatgaggaagcgcttctggcacaactggaagcgaacaggaaagacccgaagaaaatgaaaaagaccggcttcgctgcccgccttgaagctatgcagaagcaacaggagcagatgatgaaagaaaagcagaacaggaaataaacttccgttcaagatattttttcagaaggaagccggacaatgcactttgcccggcttccttttccttttttcgagtatatcagtctcccccaaaaagagttatcgaatgtatcccaaaaacctatttatcgaatatgcagactaaatacacctacaaagaaatctggcttatagcctaccctattctcatcagcctgctcatggagcagatgatcggcatgacagacactgccttcctgggacgcgtgggcgagatagaattaggagcatccgccattgcaggtatcttctacatagtaatgttcatggtggcattcggtttcagtatcggagcgcaaattctgatagcacggcgcaacggcgaacagcaatataaagagataggcaacctcttctaccagggagtctatttccagttgggaatggcagcggttatgtttgccctctgttacagcttcgctccggtgatattgaaacggcttgtctcttcccagcacatctacgatgcggcaatgagctacctcaactggcgtgtcttcggattctttttctcctttacggcagtgatgttccgtgcgttctttctgggaacgacacagaccaaaacgctgacgctgaactcaatcgtcatggtattgagcaatgtcgtattcaactacatcctgatattcggaaaattcggagtgccgcagctcggcattgccggagccgccataggctcgtcgttggcggaattggtgtcattgatattcttcatcctctacacccgtcaccgtatcgacatccgcaagtacggactggacaaaataccgggtatccgctggaacatactcaaacgcatgctcaacgtctctttctggacgatggtacagaatttcctgtcactctccacgtggttcctgctcttcctttacgtagagcatctgggagaacgttcgctggctgttaccaacatcatccgcaacgtatcgggcataatgttcatggttatgatggcattcgcttcaacctgcggatcgcttgtcagcaaccttatcggagcaggacacaccgactgcgtgcccggtacgatacggcagcatatccgcatagcctatgcgttcgtgttgccgcttgccgtgttctttgcgctgtgccccaagctgatactgagcgtgtacacggatatgctggaactgcaagaggcagccgttccctcgctttgggtactttgctccgcctatctgttcctcgtacccgccaacgtctatttccagtccgtatcgggaaccggaaacacacgtactgccctggccctggagatgataacactggtggtttatacctgctacatcacatacatcgtagcttatctgaaactggacgtggcatttgcatggacatcggaaattgtttattccgtaggaatcctggtactttgctatttctacatgaagaaagggaaatggagtctgaagaaaatttaaattaatttcctatcttcgttaccgaaataaatcttcaaacatatatgaaacaatcaaacctattatttatgtcggcagcaatgatgttggcatcctgcggcggaaccagagacgcaggacagaacggaacgcttatcgaaagatcggatataaagattgaaggtaagcgcatgacgcccgaagcgctttgggcaatgggccgtatcggcagcgtagccgtatcgcccgacgagaaacagattgcttactcggtagcctattacagcgtaccggaaaacaagagcaacaacgagttgtttgtcatgaatgccgatggcagcagcaacagacaaatcacccgcgacagctggcaggaaagccaacccgtctggattaaagacggcaagaaaatcgctttcctctgcaacgaaagcggcagcagccaggtgtgggagatgaacccggacggtacggaacgcaaacagctcacccggtacgagggagacatcgaaggattcgctttctcgcccgacggcaagaagctgcttttcattgcgcaggtaaaaaccgtgcagagcaccgccgacaagcatcccgacctgcccaaggcaaccggtatcatcgttaccgacttgatgtacaagcattgggacgaatgggtgacaaccgctccgcatcccttcgttgcagacttcgacggcaacggcatcagcaacgtacaggatattctggacggcgaaccctacgaaagcccgatgaagccctggggcggtatcgagcaactggcctggaaccctgcttcggacaaagtggcctatacctgccgcaaaaagacgggactggcctatgccgtctccaccaattccgatatttacatctatgaccttgccaccgggaaaacggaaaacatcaccgaagagaacaaagggtacgataccaatccccaatattcgcccgacggcaagtacatagcctggcagagcatggaacgcgacggctacgaggcagacctcaaccgcctgttcgtcatgaaccttgcaaccggagagaagcgtttcgtaagccgcgccttcgaatccaacgtagatgctttcttgtggaacaaagactcgcaaagcatatacttcatcggcgtatggcacggtgaaacgcagatttacaacatcggtcttgccgacaatgacagtctgaaccggcttaccgacggcatgcacgactacgcctctctcgccctttgcggtgacaagctcattgccaagcgccactccatgagtatgggagatgagatatatgccgtaaacaacacacgcagcggcaatgcttttgccaaggccgagcaactaacattcgagaacaagcaaatctacgaccaactggagatgggtaaagtagaggcccgctggatgacgaccaccgacggcaagcaaatgctgacctgggttatctacccgccccaattcgacccgaacaagaagtaccccaccctgctcttctgcgagggagggcctcaaagccccgtcagccagttctggagctatcgctggaatttccagattatggctgccaacgactatatcatcgtagcccccaaccgccgcggtcttccgggcttcggtgtagagtggaatgaagccatcagcggcgattacggcggccagtgcatgaaagactacttcacagccatcgacgaaatggcaaaagaaccgtttgtcgacaaagaccgcctgggttgtgtaggcgccagcttcggaggcttctccgtttactggcttgccggacatcacgacaaacgcttcaaggcattcatcgcccacgacggtatattcaacatggaaatgcagtatctggagacagaggaaaaatggtttgccaactgggatatgggcggcgcatactgggaaaaggacaacgccacagcccaacgtacatttgccaactccccccacctcttcgtagataaatgggacacccctatcctctgcattcatggcgaaaaggatttccgcatccttgccaaccaggcaatggctgcctttgacgccgccgtaatgcgcggtgttcctgccgaactgcttatctatcccgatgagaaccactgggtgctgaaaccgcaaaacggcgttctgtggcagcgcacattctttgaatggctggataagtggctgaagcctgcaaaacaataaagaaagcagataaaaaagaatatgaaaaaagaaagccggcacatcgttgcagtgatgttgccggcttctttttttctatgtcatgcctccgcttgtcagaccagcacgcccaatatcgggaatgtcgctccctgcattgcgaagcagatgccaaagacacatgcacttacaatccaaagaatgaccaatgtccatttcaggccggaaaccataggctgccacttgaatatctggctgaatatcatccaaacgaggcttaccaacggaatgcccactaccaggatacctgcaatatacatcacaatggccgataacggagaagcaggcaatactacattaaaagtagggaacatcgagataagtgctgccccaccgccgatggccaccattacggcagcaaaaagcagggctacgaacaccactccgaacacaaacagcagcggactgcagatgatagcgaatatcaccaggcagattttaaggaacagccccaccaccataaccagggcatcgcccagtttctgcaggaaagtgcgaggcttgtcggacctcatataatcgttcacaccgtttgccaccttctcaaaaccgccggtcaccgtcttacctatattatccaccgtaaccgcctcgccccgcatactcagtttctcggctgccgtgcgggcttccggaacgattatccagcaaatgatataggcgggtatcaggagcttgaatccgaaaatcatgattattacaagcaccagacgcaacatcgtcacgtcccaaccccaataggcagccaatccgctcaccacaccgcccaacatcttatcgtcgggattgcgatagaaatggtgagacactttctccgcagttgcggaagcgcctgcacctgtattgccggcatggttgctgccgtcccaactgccgcttccggaagcggcatctcctgcatcaggctccagttcctccggctttcccatgcgggcaatcacttcttccacataggcaatggtaatcacctgcgaacccgcagcaagcttctccgtaaaaagctcggagatacggcgttcaatatcatcgattatctcgtctgcaccggcttccttacggaaatgtatcttcaggttgcttaaataattatccaaaaggcggtaggcatcttcatcgatatgaaaaaccgttcctcctaaatttaccgttaatgtctttttcatcgttatatgttttttatttattctttcattactcttcaatagcccaacatgcttcacgctaattgttggcaatatgattgaccgtatcgctcagttcgcgccaggacacctccagctcacccagaaaagcttctccttttgcggtcagcctatagtatttgcgaggcggtccctgcgtggactctatccattcgtaactcagcaaatcatcgttcttcaaacgggtgagcagcggatagagcgtaccttccaccacaatgagcctcgcttccttcagtttctgtataatatccgaagcataagccggctctttatggagcaacagcatgatacaatattcaagcatgcccttgcgcatctgcgactttacattattaacgtccataattcgtatatgttattaaatggtttgactatttacaacaaaaaatgccatacctgcatcctttgtatggcacaaatatatgtattatcttagtaccttgtattgcaaagtaccttacattaatattatttaagagtatatatgaccggagagcaatccgggctgcgcctgtcgcacccgcaaaattcccgttgatatgccacaaataattgcagtttggtttctgtttgaaacaaagtatgctatatttgcatcatattaatataaacgcaacaaaacatgtttaccatcagaaaagcaacaagcgccgattgcgggttaatccataaactcgcctggcagatatttcccgaaacttacaaagaaattctttcaaaagaacaaatcgaatatatgatggaatggatgtactccttagaaagcatccgccaacagatggaagaagagggacatgtgtacctcattgcctgtgaggagtgcgaagcggcgggttatgtatccgtacagcaacagggaaaagacctgtttcacctgcaaaagatttatgtgcttccttattatcagggcgcacactgcgggagtttcctgtttagcgaagctgtgaaatacatcagggatgtgcatcccgccccgtgcatcatggagctgaacgtaaaccgcaacaacaaagcggtaggtttttacgagcacatggggatgaagaaatccagagagggagattttccgataggaaacggatattatatgaacgactacatcatgcagttgaaaatcgaagaataagcagcgggctgcattatggaatccaaagggctacactacgtttccaaagggctacactacgtttccaaagagctacattacgtttctaaagggctacattataactgtaaaggtcaactctgcaattccaaagttgacctttacgttttctctattatttcgctactctctccagccatttaaccattgagagcatcacaatcatggaagcgcccgttgcacccacgaaaaccaaccagcatgcccagattggaacagtggtgtaaaggataccaccaacgaaaagcagcgaattacctactgccgttgcagccagccagcaaccctgcatcagaccctgcaaatgagggggagccaccttggacacgaaagacagtcccagcggtgagatgaataactcggcaaccgtaaggatgaagtacaaacctatcataatccacggagtcacacggatggcattgatttcggcggcactcatcgtgctcaacgcatctttggcaggcaaagtgaacgagaatatcatcaggaacacgtatgccagtgccgcaatgcccataccgatggcaatcttcatcggagtggacggttctttatcctttttcttcaatgcgccgaacagccacatgataaacggagtgaggaataccacaaagaacgggtttacacactggaagatttcagcacccttgatgcgggtaaagccaaggtcaatatcgattacgctcaagtctacatagtcgcgtgcaaagtaagtcagcgaataaccgttctggtggaacgacagccagaagaagattaccacaccgaacactgcgaacagggcataaatacgctgtttgatttcggctgcgctcatcttgatttcttctttgcttacggtagcattctgttccttggcagctacaaccttctttgccgggtcggggaaacggttcttgttgaccaggtagattaccaatgaaatcaacatggcaacgatggcagccatgaaagcatattggaaaccgcggttaaacacatccaggtagttgttgacaaacgcacccatatcagccacatggctgccgtcgagcgtaaccttgtctgccagagccgtaagattctccatagcctggggagccatcttgtcgccctctttaaggaattggtgacaaagttcgggcaaagtggcatcatagtcgaagttgttgaccttcagccaccagttgcgcacaccgatagcaatccacggagcgaagaaaccgccgatgttaatgaacatgtagaatatctggaaaccggagtcgcgcaggcttgagtacttgggatcatcgtacatctgacccaccaatgcctgaagattacccttgaacagaccgttaccgaaagcaatgaccagaagtccgaaacaagtcagtcccaggtaaagtcccatgctgggaacaggcgtaggagtaggaatggcaataatcagataacccaccgccatcatcaccagaccggcaaggatagtgcctttgaagtttttagtcttatcggcaatgataccgcctgccaatgccagaatatagatagatgcatagaacgcggaatagatatatccggtagtcgtttcagacagcccgaacttcgccgagataaacagtgtaaggattgccatcataatatagaagccgaaacgctctcccatattagccaaagcggcagcaatcaaaccattagggtgcttgctaaacataaaaataagtttttgtaaattagtaattagtattagtttatttatattttttgcaaatatatacttttcatcgagatttccggtaagaaaacgaaatatctcttgccggaaatcaggtttttaatatccctttcacgaaaaaagccggaaaaagcgtgtgaataattacactatgacaatctgtgccggaaaaagcattaaaatcacataatccctcatgcttacacacctcatgcctcgaaaagcctgcaaacctcagcgtgtacctcctttatcaaatccttcggattgagtttgagctgcaacccgcgctgcccggcactgatgtagatataggagaattgcaggcaggtttcgtgaatataggtagggaaaggctttttcatgccgataggcgaacaaccgccgcggatataccccgtcagcggaagcagttccttcatcggaataaggtcgcacttcttgtttccggacaccttggcagccaacttcaggtctacttcgtgctctccgggaatgacgcacacaaaataaccggttttatcgccatgcaatatcagtgttttaaatacctgctctatatcctctcccaaactggcagccacgtgtatggcactcaaatctttctcatccacctcataaggaatgagttcgtaggcaatctttgccttatcaagcagccgggctgcatttgtcttgttgattttattttctttcatcacaaactataattgcagacaggcgaaaagcattccgttgcagaaagacggtttgccgtccgatgcctttcacccgtcatttttctttcagactattttaaagatgaagttcttctttcaggaacttcggggtatatcctttcgtactcatcgccacctcttcgggcgtgccgcaagagagaagctctcccccgcccttaccgccttcgggtcccatgtcaatgatgtaatccgccattttgatgacatcgaggttatgctcgataacgatgaccgtgttgcccttatcgaccaatttattcaatacattcatcaggacgcggatatcctcaaagtgcagtccggtagtaggttcgtcaagaatataaagcgtcttgcccgtatcacgcttggagagttcggtggccaacttcacacgctggctctcgccaccggagagcgtggtggaagactgccccagcttgatataccccagaccgacctcctgaattaccttaatcttgttcaatatctgaggtacgttttcaaagaattccacagcacgatttatcgtcatatccagtacgtcggcaatggacttacccttgaagcgcacttccagcgtttcgcggttgtaacgcttgccatggcaaacctcacaaggaacatatacatcgggcaggaaattcatctcaatggttttgtagccgttgccctggcaggcttcacaacgtccgccgcttacattgaacgagaaacgtcccgccttgtatccacggattttggcttcgggcaggccgacaaacaggttgcggatatcggaaaagactcccgtatacgtggcaggattggagcgcggagtacgccccagcggcgactggtctacattcaccaccttatctatatactccagtccctcgatactgccatactccaaggggtcctgaagcgaacggtaaaacttctgcgaaaggatgggctgaagcgtttcattaatcagtgtggactttccgctgcccgatactcccgttacacaaatcagtttgccaagcgggaactccacatccacatttttcaggttattgcctcttgcaccgcgcagccacaggctatggccgttgcccttgcgccgttcggcaggcacttcaatggcacattcgccgttcaaataccgggaagtcagcgtatgcgtccgcaacatctgctgcggagtgccggcaaataccacctcgccccccagcctgcctgccttggggcccatatctataacgtaatcggcggcaagcatcatgtctttatcatgctccaccacaatcacggaattacccatatcgcgcaactccttcaacgaatggataagccgcagattatcgcgctggtgcaatccgatgctcggctcatccagtatatacagcacgttcaccaactgcgagcctatctgcgtagccagccggatacgttggctttcgccgccggagaggctgacggcgctgcggtccagagacagataatccaatcccacatccagcaggaatttcaggcgggtacggatttctttcaatatttctaccgcaatctgctgctgtttcctgctaagatattggtctacgttcatcagccagtcatacaactcgttgatgtccattgtggagagttcgtagatgtttttatcgtgaatacggaatgacaaggcttccttgttcaacttcgctccgtgacattcgggacagacagccgtcctggcaaattgctccgcccacttctgtgccgtggcagacgcatccttttcctgcaacatctggatatacttcaccactccctcaaaagtgacaaagtagtcggaagacgtaccgataagggagctttttatctttatacgctcatccgaaccgtatagaatctcatctatcgcatcgtccggcagctccctgacaggagttttcagcgtagcttcatacttctccagcaatgcggcaatctgccagaatatcatgctgttcttggcttttcccaaaggaatgatggctcccccgctgatggaaagctcgcggtcggggataatcttgtctatatcaatctggctcaccacgcccaaacctttacacttgggacacgccccctgcggagaattgaaggagaagttatggggggcaggctcgcgataggacagtccggtgacaggacacatcaaacgcttgctgtaatggcgcacgctctcgctttgggcgtcaagcaccatcagcagcccgtcgccctgacgcatggcaacggcaacgctgttcttcaggcgggtgtcgtctttatccgccaccaccagtttgtcgattaccacttccacgtcatggttcttgtaacggtccagcttcatgccgggcaatgcctcgcgcacctcgccgtccacacggacatagaggtagcctttcttgcgaatctgctcgaaaagttccttgtagtgtcccttacggttgcgcaccaacggagcaaggatgtaaatacgttttcctttataatcgttcaggataagctcgagtatctgctcttcggtatatttcaccattttctcgccggaaagatacgaataggcctcgccggcacgggcatacagcaggcgaagataatcgtatatctccgttgtcgtacccacggtggaacgcggatttttattggtggtcttctgctctatggaaatcaccggactcagaccggtaatcttatctacatcgggacgctccagattgcccagaaagttacgggcataagcggaaaacgtttcgatatagcggcgctggccctcggcaaatatcgtatcgaatgcgagggacgacttgccgcttccgctcagcccggtgattaccgtaaggctgttgcggggtatttccgcatcgatgtctttcaggttatgtacacgcgctccgtatacattgatatattctgtttcttcttgcatattttaatgaatgaatttgtgcaaaaataacggtttccgaccgaatatcagtcgaaaagcggtatttttcggttttgaaatgcacaatattatttcttaacgcaatcctttggttaaaatgggacaatattgttaactttgcggctactttgggaaattgtaaacataaaccaacgattactgaatgaaaacgattaaccgtattttttgttccctgctgcttgccggcgcgtgcagcctcggaacaagcgcacaagaaaaccaatcctactttctgcatacgatagaaaaaggccagagcctgtattccattgccagcatgtacaacatcagccaggcggatatagtaaaactgaatccgggaagcgacgacaagatatacgtaggccgtaccctgcgcattccgcgtacggatgccggcttgcaaaaggagactttccataccatagctcccggtgaaaccctttaccggcttacggtgaaatacaatgtgtccgctaaagccatatgcgatgccaaccccggactgagcgccgataacttccgcatcgggcaggttatccgcattccgtcggccacggatgcggcagccgccaccgcagacacgcagacactttcgggcatgcccgcaggcaacactaccattcaggccccggtacaatcccgctgccgcgacatgcacaaggtaaaacgcaaggaaacggtattcagcatcagccgcgaatacggcattaccgaagccgaactcatagccgccaatcccgaattgcggggcgagaacaagataaagaaaggttcgttcctctgtatcccctatccgtcctctccttctgcaacgcagcaggatacaccccggcaggccgcaccgagcgacagcgaactgttcagtgaaaacaccagaagcagcaagcgcatcaatgtcatcaaggctgccgtagtccttccgttcctgcccgacggggcaagcaaaagcgaatctgccaaaatggtggaatattacgaaggattccttatggcggtagacagcctgaagcgcacaggcacttccatagacctttatacttacagtaccggtcctgctacatcctccctaaactccatactcggcaaaagcgagatgaaggacatggatattatcttcggcccgttgcaccagcagcacatcaagcctttggccgattttgccgacaagcacgacatacggctggtgataccgtttacgtctaaagacaataccgtattccgcaatccgtcggtataccaaatcaatactccccaatcctacctttattcggaagtgtacgaccactttgtacgccagtttcccaacgccaacgttatctttatcgaggcaagccagggaaccagagagaaggcggacttcatcaagggattgaaagaggagttgcgcaaccgttccatacctacaaaatcactgaaagaggatgctaccgtggagtccttgaaagccgtactgcgtgccgactgcgaaaatatattcatccccacttccggaagcaacatcacactgatcaagatactgccgcaactgacactgctggtacgcgagacgcccgacagccgcatacatctattcggctatccggaatggcagacttacaccaaagaccatcttgaagccttcttcgaactggatacatacttctactcctcgttctacacgaacaatctgctgccggcagccattaacttcaccaagagctaccgcaaatggtatggcaaggagatggacgaacgttatcccaaattcggcatgctgggtttcgacacgggctacttcttcctcaaaggactgtcgcgctacggttcgggatttgaaaagaacctggacaaaatggaccttgtccccattcagaccggcttcaagttccagcgtgtaaacaactggggcggatttatcaaccggaaagtgttctttgtacgcttcaccaaaaatttcgaactgataaagctcgactttgattaaagaaacgccttacagccatttggttacagtaattcgcaattgaagaaaatgaaactaaaaacaattataggaacagcactcttagcaggtacatgtgctttgccggcaagcgcacagataggcgaacaacgccataacttttccgtgggcatcaacggcggcatcaacctgaatagcgtaagcttctctcccagagtccgccagaacaacctgatgggtatcaacggcggagtgaccgcccgttatatttccgaaaagtatttcagcatgatatgcggtgcgcaaatcgagcttaacttctcccaacacggttgggacgaattttatgaggactatcccgaactgcaatacacgcgaaagatgaattatctggaaattcccttccttgcacatctggcattcggtaaggacagaggtttgcagttcttcgtccatgccggtccgcagataggcttctttttaggagacagctatacgataagcggcgactgggacaactacccgggactgaccgtagaacagcatgacaaagccgtagacaacaggttcgactacggcattacgggcggagccggcgtggaactccgcaccaaagccggaaatttcctggtggaaggcagatactattatgccttgtccgacttctacaacagtaccaagaaggactacttttcccgttcggcacacggagtcatcaccgctaaaatcacttatttgttcgatttaaggaaataaagaaaataacggtataatccggatacagagatataaaaagcggggcgagtgttgaatgtaacactcgccccgctttttataccggactgtctgtcttaccggacagaccttttctctttatctcaatctgtccgcagccttcaccatcagctcatcacgatagatagcgcggaaagccagataattcagtatgatacatacggcaggcaggcataaagcccatcccaactggaaagccattgcattcaaatcgtttttcaggataaacataaacgcgaagaaagcaatgtaataacctatcagcaaaagactgccgaacaccgtcatacgaacctgcaacatacggttacggaacaggaatatggtgcataatgcaataatcgcactcaacagcagaatgccgaacaaaccccatgtagactggaagtttccatcggccaaagtcacgcccaacggcttgaatatatgagccgctatcccatccggaccgataaactgtcccaccggcaagcaaagagccacaaccagcaggatagccaccaataacaaataaacggattgaatacgctgtatcattactgcaatttctctttttccttggaaggattacgataatataccttaccttcaagatattcctgagtggcaatcaatgtcggtttcggcaacttctcataataacgggaaatctcaatctgttcgcgattctcgaatacctcctcaagattatcgttgtaagaagcaaactcggccagcttcttggaaaggtcattcttgatttcaacactgatctgattggcacgcttaccaataatcgctactgattcatatacattaccggtatcctcacacaactccatcatatcacgagtcaccgtagtagtaggagcatttgtctttctgtaatccataaatttctatctaaattaattttattctacaacaattgtttcactttctgtcagtccttcaaaatcttctgtgcttccttgaagatgcggtcggcatctttcatgtatttgctttcgggaaactcgtttttaaaggcgtaatattcgtctaccgcttcacgataacgttccgcacgcttgtcttccacactatacaccgccatttcgtatttggcgcgcaggataaggatggacaaatcttcacgcatattggtgtaagggtaatcctttaatgcgttctgtgcagtgataacgcaagactcataattatttcccaaataatttcccaaattataatagagcttggcagagagatattctttcataaccagcttgtcctgcaaagcgaatatcatgctttgggcctcatctttcttcgagctgtcaggaaaatattcgaggaacatttgcagttgctgaatcgcactgtatgtaccggactggtccaaacggggctccggtgtatccaggaacaatgcctttccggcatggaaacgcgccaattcggtaaacgtaccgcgcgggtacacattatagtattgggtaaatgtctgcgcggcagtctgataatctttctggttataatagctcatacccaacatgtaaagagactcttccgctttatcagtacctttaagaatggcaatcaactcgttcagcaacgtggcagcacgactgtactggccttttgcgaagtaattctttgccgcttcatacttgtattcgtagtctgtgcttttcagcaacttgttgtattctccgcatgaggagagcagcagtgctgcaagcaaagttataaggacgttcttcttcattacttttattcaaataatgtgcaaagatagaggttcgcatcgaattaaacaaagatacgcaccttaatttttcaaaaacaaagatgaatgaggtatccctactttggcacactccctttcataaccttcatactgtcctttttttacagtttatacaagtcgctcgcagccagcaagtccacctttttctccgtcaatacccgaatacagttttccatatcgttgggacggataatgacattggcagtctgcccgttggcaaaggagtacatatattcgatgaacacgccttcatcagacaggcaacggagcacctttgccaatgaacccggaatgttgggacaactgattcccaccacatcggtcacattgacggcaaaatgattatccttcaatgccttatacgccttatcaggttcggaaacaatgccacgaagaataccgaaatcggcattctcggctatgcagagtgcagagagattgacaccctctttggcaagaacttccgtcacttccgtaaggcgaccggacttgttttccaaaaaaatagaaagttgttttgctaccataagtttactattttacgatttacaatttacgattgtcgattacgcgcttcgctttacctacgctgcgctcgatgctgcgcggctctaccaggcggacatccacgcccaggcccagtacgctttgcaggcgtgcggtaagctttttcttcaaagccagcatcttgttgatttcatccgagtagtattccggacggacttccacttgcagttccatggtatccgtattattcttacggtcgacgagcaacaggtaatgcggttcgaattcgggcatttcgagaatgacggattcaatctgcgtggggaatacattcacgccacggatgatgagcatatcatcgctacgtccgagaatacggtccatacgcaccagtgtacggccgcagggacatttgtcgtaatgcagggcggtaaggtctttggtgcggtagcgcaacagcggcatgccctctttggtgaggtgagtaaacaccagttcgcccgtctcgcccggagcaaccggttcaagagtgtccgggtctactatttcggggaaataatggtcttcgttgagatgcgtcccatgctggcattcgcactcgtaccccacgccggggcctgctatttcgctcagcccgtaaatatcataagcctttattcccaacttcgcctcgatgtcgcggcgcatattctccgtccacggctctgcaccgaacgcaccgaacttcagcttgaactcctcgcgcgggaaaccggagtccttaatggcatccgccagatacaacgcataagagggcgtgcagcaaagcaccgtcgaaccgaaatcgtgcatcagtgtaatctgtttctccgtattgccgctggacatcggaatgacggatgcaccgatattctcggcaccggcatgcgcacccagtccgccggtaaagagcccgtatccgtaggatatctggaaaatgtccgagctgcccgcaccgtatgccgtaaaagcacgcgacaggcattccgaccataccgacaggtctttacgtgtataccccaccacggtaggtttccccgttgttccggaagatgcgtgaatacggactatctgactcatgggaacggcacaaagcccgaaaggataattgtcgcgaaggtcgtatttggtggtaaaaggaagtttcacgatatcatcgatgctgttgatgtcatcgggggtaatgcccagttcctgcattttcctgcgatagaaaggagtgtcatgatacacacgctccactgtctttttaagacgaatgccctggattttacgaagactttcgcggtccatgcattcgatactctcgttccaaatcatgtttttgttgtattacattaatggttattgttaaattgataccgcaaagttatgttttacttactgatttgcaaattttcagcacaaaaacttcaacattcatcaaggagtagaaaaagatatgatatatttacattcttttcagtctgccgagttcttctgcaatgatatcgggaatgagactgacgtttttagacccattaagttgctttattttcatacctttcctatctttgcccgacaatcctgatgaaatgaataaattcgagttaacatccgcctaccgccccaccggcgaccagccggaagcaatcgcacagctcaccgaaggagtgcttgagggagttcccgcacagaccttgctgggcgtgaccggctccggaaagacattcaccattgccaacgtcatagccaacatcaacaagcctacgctcatattgagccacaacaagacgctggcggcacaactctacagcgagttcaagggattcttcccgaacaacgcggtggaatattacgtatcctattacgactattaccagcccgaagcctacctgccctcttcggacacctatatagaaaaggacctcgccatcaacgacgaaatagacaagctgcggcttgccgccacttccgccctgctttccggacgcaaggacgtggtggtggtatcttccgtatcgtgcatctacggtatgggaaatccggcggatttctataacaacgtaatcgaagtgcagcagggaaaaacctacagccgcaacgtattcctgcgccgtcttgtagacagcctctacgtccgcaacgacatcgacctgaaccgcggcaacttccgtgtaaagggcgataccgtagacatctaccttgcatacgccgacaaccttctgcgcatcgttttctggggagacgaggtggacagcatcgaagaggtagaccccgtgagcggtgttacaatcgcccgtttcgatgcttacaagatataccccgccaacctcttcatgactaccaaagaagccaccctgcgcgccatccacgagatagaggacgacttgcacaagcaagtacagtggttcgaaagcgaaggccgccctttcgaggcaaagcgtctgcaggagcgcgttacctacgacatggagatgctgcgcgaactgggtcactgctcgggcatagaaaactattcgcgctatttcgacgggcgtgcggcaggtacgcgaccctactgtctgctggatttctttcccgatgattttcttatcgtcattgacgaaagtcacgtcagcgttccgcagatacgcgccatgtacggcggcgaccgtgcccggaagacaaacctggtggaatacggtttccggcttcccgccgcaatggacaaccgcccgctgaagttcgaggaattcgagtcgatggcaaagcaggtgatatacgtcagcgccacccctgccgactacgaactgatgcaatccgaaggcatcgttgtggagcaggtaatccgtcccaccggtttgctggaccccattatcgaagtgcgtcccagccacaaccagatagacgacctgatggaagaaatccagttgcgcatcgaacgcaacgagcgcaccctcgtcaccacgctgaccaagcgcatggcggaagagctgacggagtatctgctcaacaacagcgtaaagtgcaactacatacacagcgacgtagacacactggaacgtgtaaagattatgagtgacttgcgcgagggcgagtacgatgtacttgtcggcgtcaaccttctgcgtgaagggctggacttgccggaagtgtctcttgtggccattctggatgccgacaaggagggatttctccgctcccaccgctcgctgacacaaacggcaggacgcgccgcccgtaacgtcaacggtatggttatcatgtatgccgacaagataacggaaagcatgcagctcaccatcgacgaaaccaaccgccgccgcgagaagcagttgaaatataacgaggagcacggcatcacccctcagcaaatcaggaaagcaaagaacctcaacgtatttgccggcacggaaggatttgccgaaggtggaaccggcaaggaaaaatccccggcaaccgcgccccgtccctatgtggaacaagagagcagcaccacggttgccgcagacccgattgtccggtacatgagccgcgcccaactcgaaaagagcatcgagcgcaccaggaaactgatgcaggaagctgccaagaaactcgacttcatcgaagccgcacaataccgcgacgaagtactgaaaatggaagaactgctgaaagaaaaaacggaatagaagctaaaaagcctgtctgtatcaaactgtttgacgccgcatttgttactctttgcatataacccacttaacaaacaagattatgaataaaaaaagaggaacggtagcgctgacagccttggctgccctgttttcagtagccatacagcaagcggacgcatgcacgcgcgccacttacatcggaccggagaatctggttatcacaggccgtacgatggactggaaagaggacatcatgagcaacatctacgtgtttccgcgaggaatacaacgggccggctacaataaaggcgaaacagtgaaatggacttcaaagtacggcagcgtcattgccacgggctatgatataggtacgtgcgacggcatgaacgagaaaggactggtggccggactactgttcctgccggagtccgtatacgaccgtcccggagacacccgccccgtaatgggcatcagcatctggacgcagtatgtactcgacaacttcgccaccgtgcgcgaagccgtggacgaactgaagaaggagaccttccgcatcgacgctccccgaatgcccaacggctcggcttccacccttcatctggctattacggacgaaacggggaataccgctatcctggaatatctggacgggaaactaagcatccacgaaggcaaggaataccgggtgatgaccaactcgcccagatacgagtaccaattggccgtcaacgactattggaaggaagtcggcggattgcagatgctgcccgggaccaaccgctccagcgaccgctttgtacgcgcgtcattctacattcatgccattccgcagacagcagacgcggcgattgcagtccccagcgtattgagtgtgatgcgtaacgtatccgtaccgttcggaatcactacgcccgacaaacctcacatctcctccacgcgctggcgctcggtagccaatcagaaagataaggtatattactttgaatccacccttactcccaacctcttctggctcgatttgaagaagatggatttcagccctcaagccaaggtcaagaaactctcgctgaccaacggagaagtctatgcgggagatgccgtaaaggatttgaaagacagtccttctttcacgttcttgttccagacaccggttctctgagataaggcttatacataaacgaagttgtcaaaatgcacttgacaatttctttcaagcacggacttcacagatttaccttatcctttttctgtgaaatccgtgcaactcatgtctgaaaagagacggataatgaacctttttttcaaggcacctctttttgcatgcctctttttcatggcgcacttaagagtctttctcatgatttttccgtatgtttgcaaccaaacttcaaacctgcatgcctacatggaactattagtatacaaagcctcagccggttcgggcaagaccttcacactggcagtggaatacatcaagcttctgattctcaatccccgcgcctaccggcagatacttgccgtgacctttaccaacaaggctacggcggaaatgaaagagcgcatcctgacgcagctctacggcatctggaaggaagaccccgcatcggatgcctacctgaaacgtatcaaagaagatttggctaagaagccggaaaccgcctctctttccgacagggagttgcgccaacgcgccggaatggcattgcagtatatgctgcacgactacagccgcttccgcgtggagacaatcgactcgtttttccagtcggtcatgcgcaaccttgcccgcgaactggaactcagtcccaacctgaacatcgagctgaacaacgccgaggtgctgagcgacgccgtagacagcatgattgaaaagctcaccccctcttcgcctgtactggcctggctgctggactacatcaacgagcgcattgccgatgacaaacgctggaatgtgtccaacgaagtaaaaagcttcggacggaacattttcgacgaaagctacatagaacgcggcgaaggattgcggttcaagctgcgctctcccgaaacgataaagctctatcgcgacgtactgcgtgaaatggagaccgacgcactggagcagatgaaaggcttctacgaccagttcgaaggcgagctggaaggccatgcctttgtgcccgaagacctgaaaggcggtgcacgcggcataggcagctatttccgcaagctgcgcgacggacggctggcggataaggatgttttgaatgccaccctgcaaaactgcctggcggacgccaggaactgggctaccaagacatcttcgcgcaaggacgagattatccgccttgccgaaaccagcctgatacccctgcttcaggatgcggaaagattccgcccgcagaagaaccacacgataaacagttgccgcctctcgctgcaacacctcaacaaactgcaactgctcaatcacatcgacgaagaggtacgcaccctgaaccgcgagcacaaccggtttctgctgtccgacaccaatgcgctgctgcacaaattagtgcacgaaggcgactcctctttcgtattcgagaagataggcgccaacatccgcaacgtaatgatagacgagttccaggacacaagccgcatgcaatgggacaacttccgcctgctgctgctcgaagggctttcgcagggagcggacagcctcattgtgggcgatgtgaaacagtccatataccgctggcggaatggcgactgggggatattgaacagcttgggaaacgaccagtctaaagtgccactctgcgatgctaaagtgccactttacgatgctgaagtgccactttacgacgctaaacccctacactgcgaaagcggtgtccagctccccttccctttcccggtacgcgtggaaaccttgaagacaaaccgtcggagcgaaacgaatgtcatccacttcaacaaccgcctgtttaccgcagcagtagactatctgaacgcattgcatctggaagagctgaaggaagagtgcatccccttgaaacgcgcctatgccgatgtagcccaggagtctcccaagacggaaaacaaaggctatgtcaaagtctccttcctggagcccgatgaagaacagaactatacggaaaagaccctgtcggctatgggcgaagaagtgcaaaggctgctttcggaaggcgtaaagctgaacgatataaccattcttgtgcgcaaaaacaagaatataccacccattgcggattacttcgacaaagagctgcacctgcccgttgtatcggacgaagcgttccgcttggatgcctcgcttgccatttgcatgctgatagatgccctgcgctacctgtccaatccggaagaaaagatagcaagagcctcgttaatcacgaattacagtttgcagattatcggtaagggagaagcggaagctccccttgcagcgcctgccgactggcacaaactgctgaccgccgatgcaaggaccgcgcttcccgcagagttcgtcgcccgtatggacgaattgcgcctgatgcctctgtacgaactgttggaagaactcttcacactgttcgacatgggacgcatcggaaagcaggacgcctatctgttctctttcttcgatgcggtgacagagtacctgcaaaacaactcttccgacctcgacggtttcatccgctactgggacgagacgctttgcaacaaaaccattcccagcggagaaatggacggcatacgcatcttctccatccacaagtccaagggactggagttccataccgtgctcatccccttctgcgactggaaactggagaacgaaacatacaaccaactggtgtggtgcaccgcccccgaagcgccgtacaatgccatagaccttgtacccgtcaactactcgtccacaatggcggagtccgtttaccggcaggattacctcaacgagcggttgcagttgtgggtggataacctgaacctgctgtacgtggcattcacccgtgccggaaagaatcttatcgtatggagccggaaagaccagaaaggcactatgtccgaacttctctccgccgccctgccccaagtggccaaagcggaagaaggaggttgggacgaagaagggagcatctatgaaagcggagcggtatatccgtcggaagaggcgctccttcactgcgttcggaagggaaaggacaaggatgcggacactccggacgggaaaaaccgcactgtgaacaagcttgcacagaagcccgtcaagcttccggtacatacggaaagcatgcgccacgacatcgaattccggcagtccaaccgttccgccgacttcatagccggagtagacgaagccgagtccggccggcgcttcatcaaccgggggcgtctgctgcatacgctgttctccgccattgaaacggaagcggacatcgacgatgccgtcaaccgtctggtattcgaaggtatcatcggccgtgccgagacagaggaagagatacgggaactcacccgcaaggcatttgcacaaccgcaaatcaaggactggtattcgggaacctggcagttgttcaacgaatgcgacatcatctggcaggagaacggagagctccgcaaccgccgccccgaccgcgtaatgatgcgcgacggtgcaatcgtggtcgtagacttcaagttcggcaagcccaacaagaaatataacaaacaggtacaagggtatatggaattacttgtccgcatgggatatgacgccaatgccatcagcgggtatctgtggtatgtagaagaagaaataatagagaaagtatgaaaacattccttcaatcagtagcccaagacctatactccaagatagggaacgacctgtcgcgcacggcaatcgtattccccaacaagcgtgccagcctgttcttcaacgaatacctggcggctcagagcgaccgcccgttgtggtctcccgcatatgtcaacatcagcgaactgttccgcagcctttcgcctctgaaacccggcgaccctatccggctggtgtgcgaactgtacaaagtgttccgcgaagaaacgcacagcgaagagcctctggatgatttctatttctggggcgagctgcttatcagcgacttcgacgatgccgacaagaacctggtagatgccgacaagctgttcagcaacctgcaggatttgaagaacatcatggacgactacgacttcctcgaccaggagcaggaagaagccatacaacagtttttccagaacttctccatcgacaaacgcacgcagctcaaagagaagttcatctccctttgggacaagctgggagacatctaccgacactaccggaagaacctctccgaactgggcatcgcatacgaaggcatgatgtaccgccatgtaatagaggagcttgatacggaccggctgcgctacgaccgctacgtattcgtgggcttcaacgtgctgaacaaggtagaaacccacttcttccaacgcctgcaggatgcgggcaaagctatgttctactgggattatgacgtgttctacacccgcctgccccacgaacagcaaccgccctatgtgcacgaagcgggcgaatttatcctgcgcaacctgaagctgtttcccaaccaactgcccgaaactgccttcgatgtcttgcggcatcccaagaaaatacgtttcatatccgctcctacggagaatgcgcaggcccgctacctgccccaatgggtgcgcacggtcgtgaaaagcgataccgaagcaagcaaggagaaggaaaacgccattgtgctatgcaacgaggcactgttgctgcccgtgctgcactccatcccgccggaagtggagaacgtaaacataaccatgggatttccactggcgcagacacccgtatacagctatatcaatgcccttatggaactgcaaactaccggctaccgcagggatacgggacgctatacctacgaagccgcacttgccgtactgaagcatccttacacccgacaactgtccgccacggccgaagacctggagaagcagctcaccaaggacaaccgcttctaccctctcccgtcggagcttaaaaaagacgcttttctcgaacaggtattcaccccgcagaacggaactgctgccatctgccgctatctcaccgagctgctgcgcgaagtggccgtcatataccgtcaggagaaagacgaagaggacatcttcaaccagctctaccgggagtccctattcaagggctacaccctcatcaaccgcctgctcagcctgatagagaatgacgggctgagcctgcatacagacacgctgaaacgcctgatgaaccgcctgctcaccgccaccaacatcccgtttcacggcgagcccgccatcggcatgcaggtaatgggcgtactggaaacgcgtaacctcgacttccgcaacctcatcatgctgtccctcaacgaagggcagctccccaaggcgggcggcgattcgtctttcatcccctataacctgcgcaaggcgttcggcatgactaccatcgagcataagaactccgtgtatgcctactacttctaccgcctcatacagcgtgcggagaacattaccttgctgtacaatacggcatccgacggactgaaccggggtgagatgtcgcgcttcatgctccagtttctcgtcgagtctccccacgacatctcacgccaatatctggaagccgggcaatctccccaacaaagcctcaagattgaaatacacaagacggacgaggtactgcaacggatgtacaacgcatacgacatccgccggcatcccaacgcactcttttcgccttcggcactcaacacctacctcgactgccggctcagattctactaccgctacgttgccggactgaaagctcccgacgaggtaagcgcagagatagactccgccctgttcggaaccatcttccaccgttccgccgagctggtataccaggacctcacagccaacggaaaggagatacgccgggaagacctggagcagttgctccgcaacgacgtaaggttgcaggcatacgtagacaccgccttcaaggaagagtttttccatgtgcctgccggcgagcaacccgaatacaacggcacacagcttatccactccaaagtaatcgcatcctatctgcggcaattgctccgcaacgacctgcagtacgcccctttccgtatggaaggcatggaacaaaaagtaacggaaaccctggagatagagactccttccggaatgcttccgctgaatatcggcggaacgatagaccgtatggacagcaaaggcgataccctgcgcatcgtggactacaagacgggtggcactcccaagactcccgaaagcatagagcagttgtttacccctgccgacaaccgtccgaactacatcttccagactttcctgtatgctgccattatgtgccgcaagcaaggactgaaggtagctccatccctgctgtacatccaccgtgcggcatccgagagttactcgcccgttatcgagatgggcgcaccgcgccagcccaaagtgccggtcaacaattttgcgttttatgaagatgagtttcgcgaacggctatcagcgctcctgcaggagatatacaatcccgaagagccttttacccaaacggaagatgcgaagaaatgcgaatactgtgactttaaaagactgtgcaagaaatagaggagtacaataaaaaacaatagggcaattaaagtaataaaatctgagaaatcatattgcagccaatatcactttagcaccctattgttttattgtactcttttttatttcttcaacgggatggaaaaatagaatgtcgaaccctctcctttcttggatgtaaaccacaacttgccgccactcttcactgcaaaatcctgacacagcagcaatcccagtccggagccttcttcattatttgtgccgaacgtactgaaatgcgtatctgtatgcagcagtttctgctgtccttcttcatcgatgccgcagccgctgtcttttacactgactaccaccgtatctccttgctcttccatcttcaccaacacttccgaattttcgttgctgaatttaatggcattgctcagcagattgcgaataatggttttcagcatatcaatatcggtacagacaggcagcttctccggcttttcttcacggatggtaattttcttcaagccggccaccatattgaacacatcaatcacgctgtctaccacttccacggcatccacatcctgatagacaacattcaggttgccaatctggctttttgtccacttcaacaggttatccagcaatgaaaacacatcttccgttgtccggtttgccattgtcagcagttcgtacatctcaccgccaatcttctcaacgggcagattgagcatcagcatgttcagcaccatcttgatagagcccatcggagaacgcagatcgtgggcaatcacagaatacaacttgtcgcgcccggcaatgatgcgctgcaactcttccgtcttattcagaatgatacgtttggccgccaccaatgaaatctgatgagtgacacggattatcagctcttccttattgaaaggtttggagataaagtcgctggcacccgcctgaaaacctttcactatatccgtcgtactgttcaacgctgtcaaaaagatgattggaatatccgctgtatcgggattggatttgagacgctgcgctacttcaaagccgcttaaatcgggcatcatcacatccagcagcagcaagtccggacgttctttatccacttgctccaaggcctgccgtccgttgtttgccgtagcaatcgcaaacttctcatttgtcaggagtactttcaacaacaatacgttggacatcacatcatctacgatgaggattttgtactcagaaggatttatttccatgttcatctttgtattatattttttcccgttattggtaccatatttattcaggaacgatacttgccgaaatattcaatcatgtggagcaagccttcctccagctctattgcaggctgccagtccagtttatgtttggccaacgtaatgtccggtttccgttgtctcgggtcatcgtgcggcagtggtttgaatatcagttttgatttggagcctgtcagcctaataaccttctctgccagttcaaggatggagaactcgttgggattgcccaaatttaccggaccgataaagccttcttccgtattcatcatacgtaccatcccctctatcaagtcgtccacgtactggaaactgcgggtctgggcgcccgaaccgtaaatggtgatgtccttgtcctgcaatgcctggaccacaaagttggaaaccacccgcccgtcgtcgggcagcatgcgcggaccgtatgtattgaaaatacgtataatctttatgcgtattccgttctgacggtaataatccataaaaagcgtctctgcgcaacgcttgccttcatcataacaagaacggataccgattggatttacatttccccaataactttccacttggggatgtatgacaggatcgccgtagatttcgctggtagacgcctgcatgatttttgcacccgtctttttggccagccccagcatattgatggctcccaataccgaagttttaatagtctttatggcatcgtgctgataatgtaccggcgatgcggggcaagccaggttataaatctcatcgacttccgcctcatagggcaattccacatcgtgaagcacaaactgaaaacggggatttcctttcaggtgggctatgttctcttccgaaccggtgaagagattgtccaggcatattacttcgtgtccgtctttaatcagccgggtacacagatgagaacctataaagccggcaccaccgctaaccaatatttttttcatgcagcacttatttctgtgtccgaagaccatgcaacttgtttgttctgtttatgtgctgacaaatgtaggcgatttgactaaaatatgcaagtttacaggagaattatttcaactatcaaggcatatattccggcttgttgtcaggaatactgaaatctttattggcaaacaggtctgccaaacccgaaatttgcttcagacgaagcagctcgtcccggtccattcctatgtttttcataatccactggtcggacataccggcacggtccagttcggcaacgatgttgcacatcaactcgatgttatgcgccccgcgcgcacggttatggcggatagtggacgccatgcggttggacagctccttgtcaattacaacaaccggcagcaagccgttttcgcgctgataaatccgcttggaagttttcaatacctgatagcggtggtagccgtctaccaatatatagttgtctttttcttggtcgtaatagcacacgcagggcattgtaaatccgtcttcccagatggacagttccagcaatttcatttcgggcggtgccactacattggggttataatcattggcctgtatcttttctacgggaattgcttttacattatataccggacttttatctacactcataacatcatatttttgaattgttccattatcttgtctcgcttgtatatctcctctttggtcagggcaaaccccatgtacttgcacgcgtggtcgttctttaagatacagatgcacatgcgcttgtaggtagggatttccctgaattccgttatatcgatatcatccagataatccatgcggacaggtttcttgtttgtcttataattggtatgattcatcacttcgatgggaatgcctgcatcttgcagcttctttatggtattctcgcccaagcatcccccttttgtccgccagaattcgatgctgacggtcagcttcttcagatagttgcgccgggtttcttcgggcaaggtggaaagcaggaattgcataaagctcttccaggtatacccttcgggaatgcgtacgctctgccagcccatggcgtgagtaccgccatagataccggtaaagttcaccccgttgacacgtcctatcatcttcccccaggtattggggtctatcactttatacaatgcaaggctctcctgcgcctcgcacagaaacggacttgccacacgctggcgctctatattgacacccgccttataatacaaatcgtacagatggttataatcgaagccgaacttaccgttggcagtccatatgtccgttgttttccagtcgtagatgggataagcgttgaatatgtcattgcctattttggaagtccacctgtagttatggtacatctggtatttacggttcagatgaatactgcgccagcggttgaagctttcctgcgtgcggataccaataaggaaacaggtgcgcaccgcatctttccgctgatgcagccatttggcaaagtgcatctggaattcgtaatcccacattttctccgtatagaaagggaacgcttctttcgtataagaaccctgcggcatctgacgcacccaaagctccttcatactctcgtcccaaggacgccaatagctctgatacatggatgtgcaggtggtgaccttgaaagggacacatacccgatagacttccagaatatccttattggcttccaatatacggtctacataatctatggttacggtgtactgtatctcataatccatatgaaacacacacaattttcgctttaaattattacgccggatgtaatctatgcacaagttcagcaatacgccactgtccttccctccggaaaacgacacgcatattgtatcgaactctttaaaaatcagttctaaacgttcctgcgcaagttcgtatacatttttagaaacagccatagttatctgtcttttttcattttcacgtagcgagtccagactttctcctccgaaaaacctaattccttaaaaagagaacaatgctccatgaaagtaactgatgtcaattccttacccgcagttgtattcgatataaccttctccaataatagcttcagcgtgctttcattattgtcctctacataatagttgttaatgatacactctttcttcttctcttctacgggtataaaacctataactttcctcttttctactgccacaaaccaaacaaaatcttccgatgtacgaaacgggtagttataattctgctttaagacatcgggattcatcaccaatggcgctacaagctcatatagccgcctgtctgttccctttaattgtataatttgtatcattcagtattatcggttttatgttttgattgtaaattgttcaaagataaatattaaactttatgccttaagtaatttttaagcagttttaagaataaagattcatattgtcgtaatttattatttttatacagaatttgtaattcactgataatcaataggcataaaagtggaattattcagtatatgactgaacctatttaagtatacgaccgaaataggatgagtatacgactgaaaggcattcagtatacagccgaatgtttcagcattttaaactataaactattttcaataaaacagttgtgtatcagaaaggattaaacaatcttatttcacccatattcttgcatttttaacgattaaggtattattaattaaataaaaattatacatttgcacagcttttaaaagtagcccgaaattcttttaatctattccgtttttccataatattgaatacataagtaaacaacaaaacaattataaacagtaaaattatgatgctaaacacaaagaaaagaccgcttatagctgcggtcctattactgacatcgttcggaataaccacatcgtgcatcgataacagttatgacctgaacaaggacatcgacatgacaatcagtgcaggtggcgaacatctggcaattcccgtgggatatacggagaagataacattggataaaatcatcgaactggacgagggggatgatttgcagattgtggatggagaatatcatctgctgaaaaaggataatattgatgagacgaatacgtcggtgggaactgttacggttgcagagtccgagaatattattgatgcgattacgctattggtttccggagccacagctcgtgtatcaaatgcacaatcagaaggcaaaattaacgccgaagctcacaacgtggacaaagccgtcatagaaatcggttccttagctgccgatatgccaacgaccctgactcttaaattagaacttggcgatgaaatttcaacctcattggttgaagttggaactatgacaatcaacttcccggacttcatacagttcgaaaaagagaacgggctgaacggacagacccttaccatgaccaatgtacaaataaggccatccgggtttacaaaagaactgaaaatcaacaaatacgtattcggaagcacatacggtgaaggaaatagagttgaagaaaaggaaggtgatagaatccttaaaatcgagaaccaaaagataacgatagaaatgcaagatatatatgtagataatccccaaggtagcggttctttaagtatcacccccacagtcacccttgcagaaatggctgtaagcgaagtttacggcaccatccagcctgacatcgacgtgaagcctaccgaagtggaactgaacaatctgcccgacttcctgcaagacgatgaaataagactggacatcaccaatcctgttttctcattcaatgccaacaacccactgaatacggatgtagaaatggatggtgtcctgaccggatataaagacggtaaagtaaccaaaatcgtaaaaataggaagcggtaacggtggtgcatccatcacattaaaacccagcggagacaagcaacagacaatttcaatagtacgtgatgagcaaacggttgttgaggcaaatgcaaccaaagttgtcgtacccaatctgaatgatattatcgaaacgatacccgaccacatcaacgttgagctaaagccggtcgtaaagacagaacagtattacaccgtcaatttaggacaggactacacgctgaacagcgcatacgacatcgacatccccctgagcttcggcagcaacctgaaaatcgtgtatgaagaaacactcgataacttcgacctcgaccttgaagatgtagatatcaaaaaagccgttctttccataaatgccgtcaacaccattcctttggcaatggaaatcaagaacgacaacgtaagcgcactggatgccaacggaaacgtgataaaagacatcgacgtaaccgtagagggaaccatcacggaaagcaaagacggcaagaccgaagtttcaagcgcgctcaatgtcaacttgaacgaaacggcggaaggcgccatcagcaagctggacggcctgaagctgaagataacagccgtgcccggacaagccaccgatgttcagttgctaagcacacaatggatgcagcttaaagacatgaaactcaaaattcccaacggcatcaaagtagatttgaactaagagaaattatttcatgcgatacagacaaaagattcaacaatcatatataacgaaacgaatgaaaacaaatgttttagcgattatactgtctggagccgtagcgacacttgcaatcggcgatgcgatggcacagacacagaacagccgttcaacctattttctggaaggaagtacctaccgtcacgaactaaaccccgcctttatgggcgaacgtggctacgtcagttttcccggcttgggcaatcttacaatcggcgcgcaatccacaggcggtgtaggcgactttatcttcaagaaagccaacggcgacctcaccacctttatgaacgaggaagtgagcagcgccgaattcctgaaaggactgcccaaaagactgaaagtaggtgtcaacgtagacgaatcgattctttccttaggcttccacgcctggggcggttttaacacactcggcatctccgtaaagtccaataccaacgttttcatgcccgatgaacttttcaagttcatgaaaaacggggtagccagcgaaacgggaagcagctacaacgtgaagaacgtgaacatcgtatctaccaactatgcggaaattgctttcggtcactcacgcgaaatcaacgaacgcctcacggtaggcgccaaagtaaaagcgctcgtgggactggcaaaggccaccatgcacattgacgaactgaacattctcgcctctcaggaccaatggaccatcaccccgaaaaatgccgagctttacatgtctgccaaaggcctcatcgtgcccaccaaaggcgaaaccggcaactatcaggaagacgactatatcctggatgccaacggagacagaaccccgatactgaaagacggaaccgacggacagatttcatacgatgacatcgatttcgatacggacaacctcggccccacaggtttcggtatggctattgatttgggagcgacctacaaactgaatgacgaatggacattctccgcctccttgctcgacctcggtttcatttcatggaaaaacaccaccaaaggaacaatgaacaaagacttcacgttcgacggttttagcgacatctccgtgaaagacgacggaaccgacaacaacaagaaactggacacccaagtggacgaattggtagatgacctggcagatctggcaaagtttgataaagcaggggaaggattaaagcgtaccaccgcccttgcagccaccctgcacctgggcgctcaatataccctgcccgcttacgaccgtttgagcttcggcttcctctccaccacccgcatgcaaggcaagcactcatggacggaagcacgcgtttcggcaaatgttgctcccctctcctggtttgaagcatcggtaaactacgccttatccaactttggctccgatgccggcatcatgctgaatttccacccgcgcggcttcaacttcttcattggtgcagatgttcccatgtgtaaatacgaaccggcctactacgctcctatcagccgtgcagccgtcaatgtaaatatgggtatcaactttactttcggaccgaagcacaagcgtaaatacaaaacggtagaaacccaatcactctgaatttatcaaccaaaacaagaagaatatgaaaaagatatattgtctgctgtttgccatgctgccattggctgcatgggcaggtgaggtaaaagtcaccaagccggtactgactctggaaaacgatacgctgaccctggactttaagtttaatatggaagccgtaaaagtcaacagtacccagtcttacgcctttactccggtattgtttgcgggaaagaactgcaagaccttgccgcccgttgtcgtcaccggtaaaaacaagttcaagatgcgccacaaagaccgtaagcttgccaggaaaggcgattacaatgcgccttataccattattaaaggcaagtctgccgatcgccggaacctcgtgaactataccgtatgcctcccctacgaagaatggatgagccaggcggatatgtggatattgcaggaaggcaggaaagactgtctgctggatttacccgagattcaggtgatagaaccggtagttgtggtagaagaagaaccattgccgcagaaaggttccatctgcgaaccctgcatgagcatggtatcctacctcaccccgacagaaaagccgttgaaagtgcgctctgaacaaaacaccctgtatatagaatatgcagcgggcggaacggaattcaaagccgatttcaaaaacaactccgctgagcttcaaaagctgaaggaaaccctgaacccgctgaccgaaggcgacttggttactttcaaagccatcaacatatgcggctatgcttcacccgacggctctgccaagaccaacgaccgcgtagccacaaaacgcgccgactctttctccctctatctcagaggaagttatcacttcccggacagcatactgaacgtaacatcagccggtgaagactgggacagccttgtcaagatgcttgaggaagacaagcccgactatgcggacaaagcattggaaataatcaataagtacaccaaccccgatgtacgtgaagccagactgaaatcaggactgggcagcgcttcctaccgtgccatgatgaatgaatattatccccgcctgcgtcgtctgtctatcgccatagattacgaaatacgcgaagtacgcaactccgaagccgcaacgttaatttacaccaatcccaagatgctgaatctgcaggaaatgtacggcgtagccaagaacttccggccgggtacgaaagaatacagggaagtgtacgaaatagccgctaccaattatcccacagatattgtggcaaatatcaacgctgcctctgccaacatcgtttacggtgactttgaccgcgcgcagcaatacatagaaagggtaaaagacgatcctcgtgcatggaacaacctgggcgtgctggcatggctgtcgggcgacagtgaaatagcaaaggaatggttcaccaaagctttgaccatagaaccggaaaaggcacaggaaaacttgaataagataaagtaacatacacatctttgcataaaaaataaaagagttgcaataacgggacagttccctatattgcaactctttttttaatatatcctatatcggcaacctctttattgtgcctttcttgcaacagacagcattttgcgtgcataacaccatactacgcaataggcagccaaaggtacgataaacgccatcaccattgttgtataatccgccacaagccccatcaacagcggacctaccaccccgcctaccggagacatcatcaggaaagaggaagcgcgcttggtatggttgcccaaccctctcagagaaagagcgaaaatagtaggaaacataatagcctcaaaagcatatccgcagagcagtgcaaccagcgacaccatgcccacatcaagcaacaccacaagagtagtcaccaccgttcccgtagcgcaaaccagcagcatcttctccgcacgtacacgtcccataatccaactgccagcaaaacgtcccagcataaataatcccaatccgccgaatgagagtaccaatgaggcttcacgggcattcatccacccctgttccactacataattaatgaaaaaactattaatggagatttcccctatttcgtaagcaaacagagccagcaaaccaaagataaagagtttatgcgaccacagccctatttcatgcccggcttcatccacctctaccccatgctctatttcgggtaacttaatcttcgagaaaaccaacgctaccagcagcaccactatccccatgcctacataaggcagagccacattacccgcactgccgctcccgtcttccgaaaacaaaagcagacctgccagcacaggagcgcaaatacatcccaaaccattgaaggactgtgcaaaattcaggcggctggctgccgtttccttcgcccccaattccgttgcataaggattggcagccgtttcaaggaatgtcaatccacaaccgatgacaaaaagggcaaacaagaacatattgaatgacagatagtattgcccgggaataaacagcaacgaaccgataccgtacagcagcaacccgaaaaccactcccctgcgatacccgaaacggcttatgaacaatcctgcaggaacagccattacgaaatagcccatatacatcatcgcctggataaaagccgaatgcgcctttgtaatatccagcagttcctgaaaatgcttattcagcacatccagaatggcatgtgcaaatccccataggaaaaagagagaagtaatcaatataaaaggaacaaggtattgctcccctaccaacggtatccgtttctgtttcataatctaataatttcagacaatctgtgtctatcaataaatgcggccgcaaagataagcaataaaaaggagacagccccatccataccacgtatcttcaactaaaacacataagaaagggataactgccaatacctgtttttggattcaaatacatcaccgtcaaatatctggtctatggcatcgtgcttgtttccgccgatatgatgtttggcagattgcgtcagaccgatattatagtaacagctcaacatcaggtgatttacaatcttaacaccgccgccaagattgataccgacctcagtggaacgccaacccatggatgagagatctttgtctatgacatctacagctatatgggcaagcttacgcccccaattatcctcatctaccaaaaaagaaaaagagggtcccacccccaggaacaggtcaaaattgtctgatatgcccatctcccatttcagctcaatagggatgtcaatactttgcgtttttacatcggtacttgcaccgttggcagtattggtaagtttcacaccgcgctgcacatacaataaggaaaagtcaagagcaagaccataaaaaccggtctgatattgcaacatgggacctacctgaaaaccggtctgattctcttccttgatctgactactcattccgtgaatatccgccttgttgccaagcacacctgctttcaagccgaaatgcaagccttgcgccatgccggtaaccggaaataaacatgccaatagcgacaataaacaaattacttttttcattatcatttacaaaatagaattatgggaacaaaggtatggatttccgtccgtagtccaaattctcgtacagttaacattgctctttttgttcttttttagctgtatacagtaagattaatattgatattttcagcaaaagtattcactttttccgattagcagtcgatgaatgttttttataccattttttattttccaaacaataaatatattgctaccttcgtttctgcattcggacaaggttttgtttttttggttgaaaacattaggcagaaccatgtaccgtacaataaaattattaaactaaaaaacgacggtgcaaagcccgcatacaaatttatccgtaatgaaactctatatattgatacagcgatttttagggagaaagtatgtacattatttcgtacttttctttatccttatctccattgcagcaatcatcggaagttcgtatgaggaaatggccgcatacaggttgcctctattcggagtgacctatgtatcctctttcgtatttttagtggagtacatagcccgtatcttatctgcaccggcactttatcccggcagaaaggctgtgaaagcacgtctgaaatacacattctctttctatggatttgtagatttcgtagctgtgctaccttgtatccttacctatatatattgggatacggaagtggtgcatgtcatcatcctgccttatatttttatcattttcaaactgatacggcactctcgttctttccggattatcggccgggcgctctcagccgtaaaagaggaacttgaaactgcatatactgcaagtttcatcactatctgcttttcagccatcctcatgtattatatcgaaagaggtgctcagcccgaagttttcaaaaatatcggagacggaatatggtgggctatcatcacgtttgccaccgtaggttacggagacatttatccggttacgcctttagggaagttgctgggatgtatcatctgcctggtaggcgtggctatggtagccattcctaccggtatcatcagttcttcttttatcaacattatacaaaaaaaagaaaaggaaatttcaaaataacaacctaactgattttaaacttataattatgatgaaaaaaagtgttttaaccgttttatttgcgctgttttgcacgatgagttttgcgcaattgtctttcaatgtaaaagccggtcttaacctcagcagctatatcggcgacaactcggatcactccaaattcaaacccggagtacgtcttggtgtcggaatggaatatcagttcaccgacatcatttccttgcaaccctcactgtttttctcgcagaaaggtgcaaagtattcggaaggatacgaaggtatcgtggatgctgatgcagatgtaaaaatcaaccagctttatctggaactccccatcaatgtacaattccgcttcaacattgcaaacaacaccaacttagtggttgcgacaggaccatatcttgcctgtggcgtaggtggaaaagctaaattcgacggcgaggcctccattggtaatgtcggtataaatgctgacgagaaaattgacacattcggtgatgacggacttggatacaaccgatttgatgcaggatggaacatcggactaggtgtagaattcggacaaattctggtagggcttgacacccaactcggattttgcaagatcatggatggaaatgccccacacaatgcgaatataggcattaccgtaggatacaaattttaaaactactctcttacatattttcctgtataaaaaagagtctgctgttaaaaaacggcaggctctttgtcgtatataattattagcatcttacccaaacactattttttttaaattatagaatacattcatgctcaattctcattaaatgccttttaataaccattcaaacggcactaaaatgaataacaaaattgccgttattcttgtattagcagatgtaaaatactcactaaacgatttggaaaagcattacaagacgttttgcggtttataaaaaatcgcatttcgttttgtgttaatggctgctaaaccatcacaaaacgttttgtagaagtatcacggaacgttttgcggtttatacagcaaactgcaatgtatcagaatgcgtcacggtgtgtcatcagattggtctcccgattgagacctcaagaaaaaagcccttgaaagtcaatcactttcaagggctttagagtgttgttgcggtgcgtacgggactcgaacccgtgaccccatgcgtgacaggcatgtattctaaccaactgaactaacgcaccatcatttcattttatcgttgctatctctctcgattgcggttgcaaaggtaggtgttttttttgaatctgcaatagtttgaaagaaaaaaaatatcttttttttcaacatctattgattataagagatttatgttatctttgcatagacaaaaaaaatagaaactatggaaaatacccctattgcacgtgaactaatcgataaaaccatcgaaaattttcatattactgattttgcaaaagccactatccgcgaagtaaaagctattgcagcaaaagcagaagcggactccggtgtggaatttataaaaatggaaatgggagttcccggactaccaccctcctccgtaggtgtaaaggcagaaattgaatcgctacaaaaaggaatagcaagcctgtatccggatattaacggcttgcctgcattgaaagaagaagcatcccgctttatcaaggcattcgtcaatgtagacgtagcgccggaaggatgcgtacccgttacaggttccatgcaaggaacttttgcctctttccttacatgcagccaatgtgacgagaaaaaagacacaatcctgtttatcgaccctggttttcccgtacaaaagcaacaattggttgtaatgggacaaaaatatgaaactttcgatgtgtatgactatcgtggctgcaaactgaaagaaaagctggaaagctatctcaaaaaaggcaatatatccgccattgtctactctaatccgaacaatcccagctggatatgcctgaaagaagaggaactgcgtatcatcggcgaacttgccacccggtatgatgtaatcgtactggaagaccttgcctatttcgccatggacttccgtcaggacttaagcaaaccgttccatgcgccctaccaaccatccgtagcccattacaccgaccattacatactgcttatatccggttccaaagcattcagctatgcaggacaacgcatcggggtaagctgcatctcggacaaactttatcatcgggcatatccgggactgacacaacgttacggcggcggtacattcggcacagtatttatccatcgtgtcctgtacgccctttcttccggaaccagccactcggcgcaatacgcacttgcagccatgctgaaagccgccaatgaagacaaatacaacttcctggatgaagtaaaagtatatggcgaacgtgcacggcgactgaaagagattttcctgcgccatggtttccatctggtatacgacaacgacctcggagagcctgtagccgacggattttactttaccatcggttatccgggtatgagtagcggtgaacttgccaaagagctgatgtactatggagtaagcgctatctcactggtaactaccggaagccaccaggaaggattgcgggcttgcacctcattcatccaagaccatcaatacgcccaattggacgaacgcatggccgtctttgcagaaaatcatcctgtcagataggacatatatcccctttacagagaatgaatgcgccaaactctgacgacgcttcattctctgtaaaactttaaaactccccgaaaaaatactttccggataaaaattaaacagactcccataaaaaagagaaagataatttgctcctttatagaaaaatacttaatttgggggcatgtataccaatgcagacatattcaaaatagaaactaaccatatagttcctacacgaggaaaagttcttatttccgaaccttttctgtgcgactatatgttcgggcggtctgttgttttactggcagaccatacgcaagacggaaccatgggacttgtaatgaacaagccgttacctctgttcctaaatgatttactaagcgaaatcaactgtcgggaagatattcctatctataaaggcggaccgatgagcaccgatacccttttctatttgcacacattggaaaatataacagactcgctccccatagccaacgggctctacctgaacggtgacttcaccgctatcaagcaatttatgacagagggtaattccatcaaaggaagaatacgtttctttctcggttattcgggctgggaacccgggcaactgaaaaaggaaatagaagaaaatacctggctggtggacaaagcggatattccttcgctcatggatgaaaaagcctgcagaaacttgtggaaagatgcacttagcaaacttggcggaaaatacgaaatgtggtcacgttttccgcaaatccccactttgaactgacagtaaccggacaatcatccgattacctaccatcctctacccgccccacactatcaagacgaatacattgcatcaagacaacgtccttaaatttgccgcctgcaaaccaccattccttcagcagtccacattgtacaaagccgcaagagccgaacaagcgcaagctcgcttcattgtcggcagccacatgcacaaccaactgtttcagaaataaaaagccgaaggcataatcgcacaaaagtctcaaggcatcggaagcgtacccattaccctgatactctttccgtatcgcaatccccacctcaccgcgggaatgcatcggtgcaaaatccgtaatgtcaatagtgcccaccacggcatcatcctcgcgacgtactatcatcatgcggagctgacggtcggcaaacatatcacattgcgaattttccatgtattgcctcagcacatacttggaatacggtaccgagaagttcgtaacatcccacgtttgcgggtcattctccatggcatacattatctccaaatcttccggctccatagcccgaagacgcacacgctcacttacaaaataagaaggtttcatcattctttctctatatgcagttccttacgcaaacgattttcacccggcaggcagaacagagacgcagtcaaagcaattaaagcgcaaagcactcctttattgctcagcatcatataataagtaagaaatcctgccaataccggcatggcaagcagagccaggcgcaccccactccacagtgcatacagacgtagcgcatccgtaatggcaacgacatctatcttcttggtcagcatccatgaaaacagcttcaaggaaacaggcaccaacacagcagtaagcaaaatcgtgacagtctccgcaaaataagcggcacgcacgtcccctgcataggcacctacccattctccgcccgtttctccaaatgccacgagaaatacgggcagcagccagaaatatacaaacatcatttttgtgcgggatacaacccgctttatcttttcttccatacactcgttctttaaagccatatcacaccgcacctgtaaacggagtacggtttacaatgctgcgtccaagcgtcacctcgtccgcatattccagttcgtctcccacagagatgccgcgcgctatcacggacagctttactcccagcttctccagtttgcggtaaatataaaagttggtcgtatcgccttccatggtggtactgagggcaaacacaacttccttaatgccacctgcagccaccctctgcaccagactctctatctccaggtcgccggggcctattccgtccatcggtgaaatcaccccgcccagcacatggtaaagcccgcggaattgctgcgtcgcttccaccgccatcacgtcgcgtatattctccactacacaaataacggaagagtcgcgctgagggttggaacagatgcggcaagtctccgtatcagaaatattatgacacaccttgcagtatttcacttcatgcttcaacgtaacgatggcattgccgaaagcctccaccgccgccgtatcctgacgcagcagatgaagcaccagtctcatggccgttttcctgcctatacccggcagtttggcaaactcattcaccgctttttccagtaatgtcgagggatattgtccattcataccttaaattcttctatcggtgggcaaagatagtgcaaattgggtgcaatgcaattaagttcgcttgaaattatatgaccggaatgcagcctgtcctctccaaaaacagagagaattccgcattacggacggagatttttgaaataagtgctacctttgcatgaagaaacaacaaaaaaacaagtaataaaatggagataacaagcgccgaattcgtcatcagcaatacagacgttaaaaaatgccccggcggaacattccccgaatacgccttcatcggacgttccaacgttggaaaatccagcctcatcaacatgctgacggggcgtaaaggactcgccatgacatccgcaactccgggaaagaccatgctcatcaatcacttcctgattaataagaactggtacatcgtcgatcttccgggctacggctatgccaagcgcggacagaaaggccaggaacagattcagcgcatcatagagacctacattctgcaacgcgagcagatgacctgcctctttgtcctcgtcgacagccgccacgaaccgcaagccatagacctcgctttcatagaatggctgggcgagaacggagtgccttttgccatcgttttcaccaaagccgacaagctgaaaggcggcaggataaacagcaacatccaccactacctggagaagctgcgtgaacaatgggaggaacttccgccccatttcatcacatcttccgagaaccgtatgggacgtgacgaactcctgggctatatcgaacaaatcaataaagaaattaattccaaatcataactgttacaaccaaaatgaaaagatttgttttttggcaaatactcattgccgcattgctgatggctcccaacagccaggcacaatctctgaaagacttattgaacaaagaaaacatcgagaaggcagtaaatgccataaccggtaaaagcaccgccagcatggaagggacatggacgtatgccggttctgctatcgaattcgaatcggacaacctgctgcaaaaggccggcggtgcggtagccgccaatgctgccgaaaacaagctgaacgaacaattggccagggtaggcatcaaggaaggacaaatgtctttcactttcaatgcagacagcaccttcacagccaaagttggcgcaaaaagcataaaaggaacttactcctacgatgcttccacacagaatgcaagtctgaaattcatgaaactgatcccgcttaatgccaaaataaactgtacatccgccaatatggacctgctgttcaattcggacaaactcttaaagctgattaccctgatttccagcaagagcaacaatagcacccttaaaacaatcggatcgctggcaaacagctacgatggtatgatgctgggatttgccttgaaaaaggaataaatgcggaaataaaaaatccccgcaagcataaaacttgcggggatttccgtctctttaacaaaacataaaaaagagcggaaaacgagactcgaactcgcgaccctaaccttggcaaggttatgctctaccaactgagctatttccgcaaatgatgctcttttcacaaagagcgtgcccagaacaggactcgaacctgcatgcctctcgacacacgcacctgaaacgtgcgcgtctaccaattccgccacctgggcaatcattaattcaaagaagagcggaaaacgagactcgaactcgcgaccctaaccttggcaaggttatgctctaccaactgagctatttccgcaatatactatgtgaagagaaggagactcgaactcccacgacataattgtcactaccccctcaaagtagcgcgtctaccaattccgccatctctccgacatatttcaaacatttcatagaccattgcatacctttgtgcccagaacaggactcgaacctgcatgcctctcgacacacgcacctgaaacgtgcgcgtctaccaattccgccacctgggcataggtaattgcaatcatttcatagaaagagcggaaaacgagactcgaactcgcgaccctaaccttggcaaggttatgctctaccaactgagctatttccgcgtttgcggttgcaaaggtagatattttcctttaacctgcaaacattctacgcatttttttcacacataaaattaaacattctgtccggagtgaaagcatagttttgattatcaactcattcggttgcgataatcttcgtaagaaaattttctgaatatctcagcttttccctcttttgtccacatggcaatggcaggatgatggattccgttgaacatattcgtcttcaccatggtgtaatgtatcatgtcttcaaagatgattctctcaccgatttgcagttcgtggtcaaagctccacaaccccatataatcgccgctcaggcaggagttgccgcccagccggtagacgtacgcaccgccgtcacccatttcggcaccccggacggcaggctggtagggcatttccaggcaatcgggcatgtggcaggtgaagctgacattcaggattgcggtacggatgccgcggttttccacaatgtccacaacttcggaagccaacactcccgtctgccaggtaaatgccgaaccgggttccaggataatgcgcaaatggggataacgctctttcaatccgcggagcaggcgaatcagatgctccacatcgtagtccttacgggtcatcaaatgcccgccacccagattcagccactttatttgcggaaaccagcgggagaacttcgcctccagatgctccagcgtacgttccagctcgtacgaggacgactcgcaatggcagtggcagtgaaacccgtcgatgccttgcggcagcacatcgggaagctgttcggccattacaccgaaacgggtgccgggagcacaagggttatacagttccgtttccacttccgaatactccggattgacgcgtatgccgcaggatatatcctgcccggccgcctgaatcatgggataaaaacgccggaactgagccagcgaattgaatgtgatgtgactgctgcatcgcatgatttccggaaagtcggcttccgtatatgccggagagtatgtatgcgccctgctgccgaattcctccaacgccaggcgtgcctcgtatacggagcttgccgtagaatgctccacatactcacggaatatgggaaacgaacgccacatggcaaaggacttgaaagcaaggataatctctacgcctgcccggtcggcaacgctctttatcaatgtgaggttcttcctcaacagttcttcctccatgatataacagggagaagggaaaaggtcgaaatctttgtctgtcatttttcttgttatataaacttttatagtaaaaaccggatctatcctatcactttgaaacgcgcaaaacgcagaagaagttgcttgtcgcccgcatttttaaaacggatggtggcttttgcgttgtcgccctcaccttccactttcagcacttcgcccaggccgaaacgttcgtgttcgataaactgccccggcagcacagcgttcccgcctgcggctgccgacgaatgggaagcggcagaagctgttcccatggaaggcgtcacccgctttaagttgcggggaacggtcggggcaatgatttcctgccggggacgagctcctccatcacgttttccatacatggcggaaacgaaattctctctgttctccctgcggaaagatgcggcatgctcatctaccttgcgcaccaatccggcatcttgcggcagcttaaggaagcgcacatctatatctttcaaaaagcggctgggatttccaaactccatcttcccataacggtaacggcttttggcataagtaaggaaacaatggtcttccgcacgggtgatggctacgtagaacaaacggcgctcctcttccaacgccctgggagagtcgcccgccataccgctcggaaacaggttttcttccatgcccaccacaaagacatttttaaactccagccccttggcggagtgcacggtcatcaacgttatcttttcatcgtctccgtccttgtccgaatcctggtcggtaagcagggacacttccgaaaggaaatcactcagcgtggtattggcattcccctcttccagccgttgtgcacagaagtcgctcataccgtttgcaagctcttcgatattctccttgcggctgaggttctcgggcgagttgtcctggcagacatcagcaataatgcccgactgccggattatctccgtaccaagctcgtaggcgttcttttcggcaacgctctcgataaatccggctatcaaacagcgaaaatcctgcaacttgcccgccgttcctttattgatgttcaccccgtaggtcagcggttcgcagagcacggtccacaggcttacattgtggctggtggcggcagccgtgattttatttacggtagtgtcgcctatcccgcgtgccgggtagttgatgatacgcttgaaggcttcttcatcattcggattgaccgtgagacggaagtaggcaattacatcttttatttccttgcgctgatagaaagacagtccgccgtaaatgcgatacggcatgctgcgcttgcgcatggcttcctcaaagacacggctctgcgcgttggtgcgatagagtatggcaaaatcggaatagacgtaattctcctgccggcgcagttcggctatcttgttgattacaatatcgccctcctccacatcgctgtatgcctgatacactccgatgggttctcccttatctttctccgaaaagacttccttgcgaatttgccgctggttcttctctatcaggctgttggcggcagaaacgatggtttgggtggagcggtagttctgttccagcttaaagaccttcgtacccggatatacctttgtgaaatacaggatattgtcgatgtcggctccccggaaggagtagatgctttgcgcgtcatcgcccaccacacagacgtgctgatgctcttttgccaactgaagcacaatgctgtgctgggcaaagttggtgtcctggtactcgtccaccagaatatagcggaactgcgaccgatagcgtgcaagcacctccggacggtcgcggaaaagcaggaaggtatagaacagcaaatcgtcgaaatccatggcatccgcctgccggcaacgctcccagtagcggcggtaaatatcgcgtatggcaggcatcttggccgcactatcgctttcgtaggcttctttgttgttggcataacccgcaggagacacgaggtggttcttggcattggagatacgtgcctgcaccgtacccggtttatacactttctcgtccaatcccatctccttgatgattgagcgcaacaggcttttgctgtctgccgtatcatagacggtgaatttcggggtaaatccgatctgcgcggcttccgcatgcaggatgcgcaggaatatggagtggaatgtccccatccaaaggtgacgggcacgttccgcacctacctgccgggcgatacgttctttcatttcacgggccgccttattggtaaaggtaagcgcaagaatatcccaggggcggtaaccgttctccagcagataagctattttgtaggtcagcacacgggtttttcccgaaccggcgccggctatcaccagtgacgggccgtcgttgtagagcaccgcagcacgctgtccctcattcagttcttgtatgtaatcggacatattcctaataatctaacgggtaaagttcgggcacaaagatagtgaaaggttcggacacctgcgaacaattccacaggttatcgcgttagtatagtaaagtttcaaaactaaataaattgaacttatgaatacgttattaatgtctttaacaataatgattatgacacatgaaatgcctaaacttccttacgcacacaacgcgctggaacctgtaatcagtcagcaaacaatagattaccattacggtaagcacctgcaaacgtacgtaaacaacctgaacaaccttgttccgggcacggaatacgaaaacaaagacctggttactatcgtagccaccgcacccgacggcgccgtattcaacaatgccggacaggtactgaaccatacgttgtacttcctgcaattcgcaccgaaaccgtcgcaaagcgaacctaccgggaaactggcggaagccatcaaacgcgacttcggcagcttcgagaatttcaagaaggaattcaacgcggcagcagtcggactgttcggttcgggctgggcatggctgtctgttgataagaacggaaagctgcacatcaccaaagaagcgaacggaagcaatcccgtacgcgcaggactgaccccgctgctgggcttcgatgtttgggagcatgcctactacctcgattatcagaacaaacgcgccgaccacgtcaatgccctctggagcatagtagactgggaaacggtgggtaaacggatgaaataagcaacccctcataaacccctgttgaagcgcatctgcaagctgtaaaaagcggcagatgcgttttctttttccaaagtcttaactttctgtcatatcatcaattacggctctaaacacgctctaaacacccaacgaaaagcacaacaacattctctaaacatttgcgtttattacgctcattttccgtgcggaatgaacgtaccttttaaaaatacaataggcggtaagcctttgcaaacgaaaagcataccgcctattttattgagtatcagccatatcacgctattcctcgattgcagcctgcgccgctaccaatgagtcttgattatcagtatattacgtcaagttcgggaaacatttgggaaacattttaaacacattctgcgtattctgcacgcatacatcatgtctaagaaagttccttataatccttaaatgttaacgacaatgtaaaagagcacattcaaaacaggtaagcgagatatgttgtaaaaacacattctgcttgttttgcttgcaaaattaacgattttctctgagataaaagcaggctttaggttttatttctaattcaatatagcatattggcatattgagtcattctgctacctagagattccactccatcaagtatattcagtaaaaagaaaaaagaattgccttacgcacattagcaggtttaggtttaagtttaatttgtcttatatatataaggtagtaaacttgaactgctccgaaacaagtttgattttgtaagattaaagaggcatgtattatatacatgggtaaactaaaccttaaacttggttgcttagtttacccatgcttctgttgttcaacttttctctttactgaatggtagtctgtccaaatcgagtctaataaagacttgtcagagtattagtaaagtgcaatacaattgagacatataaaacaagcagtgtcaagttataacaattagggttgacactgcttgtttttattttaatctatgcacattgttatttcatatactcatagatgaaaataggaaatgaatttaatactgcaacatttctactaggtttgacatggagcaaaagttgtctttcgaatattgatagttgattgataactgacttctcctttggcatcgtatttactcctgctataagcaagttagctttactgacattcatctgcttaagatattgccagttgtcttttaccttaatgtatttttccttggtcggcgtttcgccatccttgaacaatatgtggtcaagactattataagccgaaaaatcacgagacagacgtttgaagtccttgcactcttctctgcttactacatagttggcataatcgttgtcgggaagttccttggtatagcggatggactcaatcatcgggtagttgatgtagagctttccgttctcggtttcgtctgcaaacaatgccagcatctcttctactctttgattgatttcttcaagcgaaaggtgagagttttggaaatcatagtcgaagaaaaggaatatttccgaaatatctgaacttctaatgccgttcaaggtggagtcacctcttgctgccaaacgttctcgcatgacagaaacaatgtctccaccgtcttcatattccttcagctcattgtaaaggtcatatatgttgttcccgaaagaacaaatgatattgtcatttaccttcgggaaatagagtctttccaatgttctatacaggcgaggctcacgctcatcgccttcaaatacaaacagaatcataagccaaaagttccacctctatatagtttctccaagttatgagcaaaacgaagttccttgtccgtcaaatcgcaaatagcctttatttcgttgtttctaagaataaagaagcagtctggacgaagcaagtcattggaaagaaggaatgtgtcgtgggtggttacgaacacctggttgttgccttcaaacaatcgcttgcaaatcttataggagagttcgtggtggtagaaagcatcaaattcgtcgatgaagacgaatgaagcgctgtccatctctttcagccaataatactgcaactccagatttctagtacctgtggatgcaacccattggaacggaattctcacaccgttcattatgcagaagagaatgttgtcgccctgcgtgttaggcgcaaactcatactcctggccacttacttctttcaaataagctgcaaagtcgtcagcaaggttgttctttatgatatactcttccacgttgctgccaccttccttcaacccaatgaattcacgataatcgagacttctgaagaacagcatattctctacgaaatcgcgaagttgcagcaaggcatggtctttgggaaggggtacagaacccaacagatagtttactatagaaatattgttggcgctgtctttaagattctgaatggcaacggcggtcaagccaaattcttcggaaatagcaagttcttctttgtctttaacaagaacttctttgttgtcaatagtcagcttttcgctaataatatcgcctttaagttccgaagctattttactgtaattgtatgctaccacatgaccatcaaaagcaaatgtgtaatcgaattcaactggttcgttgtggcatgatgcacaagcatagttcagatagtaatcaggcttcttccacttgtgagaaagatggttggcgatgtcgaatattgccaatccgaagttcgacttaccagctccattcggtccgtagataataccgttctttacaatgccattacgtatagcatcgttattgaacgtataattgctcggatgagacaagtcccattcgatacgattcttaaatcctctatagttcttaactgcaaatttcgttaacatgacaatatttattggtgaatatttcgactgcaaaggtacaaaaaaaatgtatccgtaaataaattacggcacatattgtcatatactgctattatttaacaattcgcatcggtttacaactgctcaacgtctaaaaaatacgccaaagtcaactttaaagtttctggaagatacatcaattaaaagagataaaaaacaaaagattctctataagcatactgattggggacacacatggcattgtctgtattcacattatagtgtatttctctaatccttccattgtctttcagacgaaggtactatcgctcggcaaaattgatgtaaacatcattctgctctcgcttaaccgttccattcgatttcattaattaaacgttcaacttcgccttccactcgtgggtcttcgtcctcacgcagagaaatggccaaagataatctgtcaacccattcggcttttgtaccaatagcggtgacaggtgggtatttccatgcctcaatgatgatgttgccatcaaattcgttggggcgcactaagactcccgatgatttgaattcccgtagttgtttgacaggtatcatgatcattctttccggatcgggattcagccacgtgtaatgtgcaagggcattgatgccacatacggggaaattatcgtctgaaagcaaatcgtcacaataaatgcgttcttcaacagggttaacgaggaacgactgggcttgcttccacaattccattcctttcttgtcaaagtggatgaccttccgcttagaacctcctgatactttttggcaaagccccaagtcttcgaggcaagtaataccaagtgtaatgcttgcgtaggagtacggaattttgttctcaatatcacgtgcagccaatccttcgatactctctatctgaagatgatagagcagcaggtattgtgcgacaggcgttaaaaccttagcttgtttggttttacgaatgcgctcattagccagaagcattggcaaatggacgtatttgtcagatacaacgaaatacacgtctttgtcaattagtctctgccgttcataggcaggacaagttggcaacaaaaatacggttggaagctggaataacgaagtaaggttgtttgcagtaacagacaagttacgtggggttgacactttgcctttgggttctgcgaatagcaatggcataccatgaaactccccatcgtagaacttgtacgacaacatttctccgatggtaacacctttcatctgcgccttgcttcgttcttgcagttgtataggtcttcctaatatggcgatctctttcattttaaccattctgcattattttaatacatcattaaaacgatgcaaaagtattaaaacaatctgagataaccaaagattttcatacaatttatataagatatgcgtcatccaccatataatcataacgaacttctcccatacacttacattccatcgaagagatttagtaaacatgcttcataatatcagtgtgacatcaaccttattaccaccatttcgaaactttatagtatgattattgaaatattatcatacttctattataatctgtgttaagactgaattggtttttcgtatgttttttcgtcaatcatataaaagtctgttcctttgcaatgcttttgggagttctcctgccttttgagagtatttccgagtatgataacaaacaaaggataacaattaaatatcagattgaaaaatgtcaggattcgtattttttgcgctcgtcctcacctttgtctatgtggtctactttgctgtaatgatcacactagacctccatggcaagaaggatgaaaagaaatcagaagaagagacctatgatgtaggggatatgaccaacgaggaacagcctgttgcaatagaagaacgcaacgacaatcctgacgaaggtgatatgaccttcaccgaacaaatcacagatgatgggcttagagttgttaacccaactgggaatgtaactccccactcttcttttatcgaagaaccaccaataacggaacagccatcatcaacgacaagtgaagaactcaacgagaaaaacgatgaattcctggagcacattgaaccagaacatcaatgtagttacctttcagaagagtttatgcagaatctcaacaataagcacaacacccgaaaaatagaaaagaagaatgccagagataaactgtaaaaagaatcatttgtttgccatattgtcgatatgtgtcatgctcttccagccaatgttggcatcagccaaatgcggaggtgtcgattacagctggggagcagacgcactgagcaatgctcatgattttacggtaacaatgatgctctatgttgtctatctggtgtatgcaatagcagccatcgtagccatcataggagctttacaaatctatataaagatgaatacaggcgaaggcgatgtaaccaaatccatcatgatgcttattggtgcttgccttttcatgattggtgcaacaatcctgttccctgcattcttcggttacaatatagtataaggtaaaaagattaggataacaaacatctcaacctgcaggagagataacgtatgtaaaatttcaagtaaacatcaaaaaagcaaatgaagaaaatcaagtatttagcaaagaactttttcaaagccaagcgcatgaagacgctcgcaatgctcctattctgtggaaccttggcgacctatgcccagaatgcagcaggtgactatactgccggtacagatgcccttgcaaccgtgacggaggaaatcgccaagtacattccattcgtcgttaagctctgttacgccattgctggtgttgttgccgtagtgggcgcaatcagcgtttacatcgctatgaacaacgaggagcaggatgtcaagaatatcttagtcctccaaaattggttggaaaggataagaaaggaagtgacaaataaagtgcttagtatcaagcgaataagcgattttttgatttttccgattcttgctcaaccgactcttaaaaagatataataaaatgatttttgtttctgatttgtttctcatatatggcttgattttcatatctttgcacatgctttcaaaggcataatcacgatgcagaaacgatatatcagcatccgaaaagcccaaccctcgcagaccctctgcaaaattcattttcccttctttcgggagtaaattaccaaaataaaatataaacaagcatggcaagaccaaagaaacaagtcaaactgaaggagccgattaagattcgtctcaaacctctcgcagatggcaacaagagtatctatcttgacatctactggaagggagtcagaaagtatgagtatctgaaactctatatcattcctgaggtcaatccactctgcaaggagcagaacaaggaaacgatggcactcgcagaacgtatcaaggcagagcgcatcaaggctctccatggtcacggagtgcaagactgggaaaccgtcaagcagggttcacaactcttgacaggatggatcaagaagtattgtgaaggtggagtcagcaccaagaagtcaaccctccattgtcgtgttgaaatgcttcacaccgtggagaaatatcttgaagagtccaatcagaccttcatcacccttgaagaggtcaatgctgatttctgccgtgggtatgtgaagttccttcgcaccttcccaaactcacactgcaagtacattgagccaagacctatcagccagaacacggcaagccgttacctcggcatgttctcgactactctcaacaatgctgtccgtcaaggtattatccgaaacaatccaatgaaggaactggatgccaaggagcgcattcagccaaaggatggcaagaaggaataccttaccattgaggaacttaaagccctcatggcaaccgacagttaccgcccagaggtcaagcaagccttcatctttgcttgtttcactggattgcgactcagtgatatgtacaaacttgcaccgattcacattttcaagactcctgacggcaagggcgagtatattgacatggaaatgcagaagacggagaagcctgtcatcatcccactctctgaagaggcaaagcgttggttaccaaaaccaaagggaataacaactcccttctttgatataccaactactcagaccgtcataggcagagcccttcgcaaatgggcagaggcagcaggtgtagagaagcacatcagtttccactgttcacgtcacaccttcggcacaatgatgctgacacttggcgcagacctgttcaccacaagcaagttgatgggtcacaccaacattcagaccactgaaatctatgcgaaaatcgtagataagaagaaggaggaagccatcaacctcattgatggaatgttcaagtaaaggatgtactttgaaagtacccccccttcaaagagttaagggaggtgacttgaaatcaccccctttgataaaccaggatggtgtttcaccccagtggtataaccaattataacaatcattgatatgaccatcacacttcgacaaaaagaccttgaaaacgacaacaagagcctgtatcttgacatctatgagaatggcaagcgcaagtttgagttcctttccctctacctaatccctgagattaaccaagagacaaaggaacgcaacgaggctaccttgaaacgtgcgcaggagattcgtgccgagcgcgtccttcatcccgagaccattcccgagaaaggtcacttgatggttgtacccgacattcccaacgatgactcacccgaagtcattgactggatccagacttacatggagtggatggacggcaatcccgaatattccaagaggactgtcgagcagactcaataccttcaagaacgcatgaaggagtttctgaaagccaaacgcagaccgcacatcactctgatgaagttcgataagacatggttcaaggcattctttctttggctgaagaatgactatgtacctcagaagtatgtgagagtcaaggcaaagccgttgagtaatgccagtttgcggaacatgcagcaacgcattgtcgcagtattcaacaaggcagtcaagactggcaagttgaaggcaaaccccttctatcagttggagaaggaagacacaatctccaagccaaagtctggtcacaagctgtaccttacacccgatgaactcaaactcttcatggcatccgaagagactaacggagtcagggaaacccagttggcatttggcttcgcttgccttacaggactacgcatcagcgacataagggctttgcgatggtcaaacatcatgaggaacgaggtaacgaacacacttgtaatcgtccagaagaagaccaaggaactcaatgccgtcccaatctgctcaaccgcagaagcatggatgccacccaagaaggatgacaaggttttccaccttcctgcccatgccaatgtggatgcagctctcaaacgaatagccaagaaggtaggtatcacgaagacaatctccttccatacctcccgacatacctttggcacattgatccaagcggctactggtgacatcgagaccaccaagaaactcatgggtcacaagtcgctcaaatcaaccgcagtctatgcagacgtgctgactgaggaaaaggtcaaggctatctccaataccaagacggtattcaggagtcgcaagccacacaccgagaacaagaagattccacgaaccaagcgaacggcagcgaccaacacgcaccctcgcaaggtcatagatatacaggataacgaataacggctaacgagccgattcaggataacaaccagtttcatttcatcaaaagcagtgccctgattcaaggtagtggtttccgctacccttaggggcttgctatctcaaaaccaagcattcaggataacgtaaacaactaaatatcaagattatgaataagactattgacaacgagactcttcttttgaaggtagagtcatttgagcatcgcatcgaggttctggagaacactctcagcgcagccaaggaggtattgacacttgaagaagcagcccttttcatgggtatatcaaagagcagtctctacaagatgacccatcgtcatgagcttcctttcttccgtccaaacggcaaactcatctactttgagaaggctgaacttctgaagtggatgcgtcagaaccgcagcatgtctgaggctgagaccaaggaggcagcagcccagaagctgaatgaacttgccaaccactaatcaatgagtattatgaatcaggatttcaatcaacagcagtacaacgacaaactggctcaggtagccagccttgccgttacctatgccaaggatggcacaggctatcacagtatgaaggatgccttcaatgaactgtgcgagatttcacatgccaacaagggcattgaccaagaaaacactatcggcagacgaaccctgcttgtgcagagtgtctgcatcaaggctatccatgcgctcactccataccagaacgagcgacttgaacagcagctgaaggacattgcttcggactatcccgagcatcgtcacctgcatttccgcagatagtttcttctttcccttttgtcatatcatagacatatcaatgagagttaccgcttacatacgtcagaaagatacatcgaagaacgaccttgacagccgtgcttcggtgtacttccgtgtccgtgacaaagggcttgatgtcaagtgcgcaagcgaacttcagatcaatcccaatcactggagccaagaacgacagggctacaagagccgtgtcaatcttgtggatgacgataccagaaacctctttgactcacaggtcaaggagattacaggtatcataaccagggaatactatatcggagcaaactccgactggctaagacgactgatatttgcctatcaccaccccaatgcctattgcatgggcagtggcatggcggtaagcaaatcctttgtcatctgggcagagaggtaccttcagaacaagcatttcggcaagcatcaggagtgtaacacccgatgcctgattgacaaggttactcgttttgaggatgaacacaaacacccgatgaacattgacagcatgactgccgatgatcttcgtgtgtttgcggatttcctgtcttctgactatgacatatctatgaataccatcgtcactaacatgaccttgatgcgtaccgtctgcaactgggtacgaaagcagggagtcacaaacaatgaccccttctttggctatgacatgcccaaggcactctatggcactccatatttcctgaccattcaggagcgtgaccaagttctggatgcagacctaacggatgatgcagaacttgctgagtatcgtgatatgttcgtgtttcagtgtatggtcggatgccgtcatagtgatcttgtgaccttcacccccaagaacattattgacggtgttctggaatatatccccatcaagaccaagggcaagttaggtgacgttgtaagggttcctcttatccccaaggctatggctatccttgatggccatgaccatggtgatgatgaaccaatcttccccaagcattataacttcaagttcaacgatgctatccgtagaatcttgaagcgtgccaaggtaaatcgtgttgtcactgtgattaaccctaagacacggcttgaagagaagaagccaatctcagatgtggctacctctcatcttgcacgaaggacttttatcggtaatctttaccgcatggtcaaagaccctgatttggttgcttctatgtctggtcatgccaaaggcagcgttgcttttgcccgataccgagtcattgatgatgacatgaagaaatccctggttgaacttatccagtgattctcttctttttgatggcatattccttttccctttattcggttacatttcaataatatcatagactatggacgataaaaaattacatcgttgcttcactttctctgaagagcagttgaagcatcttcgaagcaagaagtacaagattgaccgtatggaatgcttcatgtcgcttgtggatcttgccgagccagttccaaaacttgtgcaaatcagcaagaccaagcaagtagaaatcttggcaggtcaagttatggttgacaatacccaacttgccaaactctgggacaaagaccgcaagacggttccaaagctgttggatgctatggaggctgtgggcattttctcttctcaggaagtggaagataaccgcatctacacccttcattgtctctcaggctggtatgttgatgccaagttcgtgtcgaatgcctttgccttaaagcgcaataacgacagtacggcaatcatccatgcggaagttcctgcctccaaggtcatcatcactgaggatcctgatgacaagaagaaggacaaggaaggttctgcttctgccgatgacaaatccaatgactctgccgagggcaacaatcctcagacaactggcaatgtgtcgcaccaatcaccacaatctaatgatagtggcaatgtgggtaagtctggagcagatggcaacaagtcaccatcacctcctgaaaacaattccccgcagtctgctgacagcccttctccccaaggtgaagccgatggcaagcagaatgaagggaagcagcatgagcagataccttctcagcaaggaggacagcagccacaacagcctaacggcaatcaaagaccgcctttcaacggctatcagaagcctaacggctactacaaccagaacggcaacaaatagccgtctgaggactcaggaatgcgacctgcaccgccaaaccatcccaaaggacgtttaccgatacaggacaacacggcaagccgaaacgactttctaagccctgacgggaacttagcaggtaaaaggaccgatttttaagaggtacttttcgagaaatccttttgtactacattatttgtgaccaaatttatgcagtcctaaaagtttctcgggctactcgcaggctcgcagacctatgtccttcttttttactgatttatattcatccctttaatcatattcaaagatatggctaagaaaaagaagattatcaagaagacacccacaagggtgcattccttccgctgtaccgataaggactggaaggaactgaaaaaactcgctaaggaatgtggtatgagcataggcaagtatctcgttgagactggcaagaagcatcacccacgtcagcgactcactccagaggaaagcaaagccctgaactctctgactgaggcacgtaccgacttgataaaagtccgcagtaagttgcacgatgcttcacccgaggaaaagcagaagatgttcagatctccaaagttcatgaagtggtggattgaagccgttgaacgactcatcaaacactggtatagcattgaagacaaccttacttctcctgtactgaccaaagttcaagaagacgaatgattatactcgcaagaccagtagcctatggcggcaatgccgcaaggtacgcaatggagaaggaggatgcaaccgtggtcaaggtgaaccacatgcctgactatctcgatgccaccgaaatctggtatcggatgaagcatcactgccagttgcatcaacaggacaggactgttgggcgaaagttggaacgcttcatgaccacgtttgtactctccccatccaaggaagagtcagagaactataccttggatgactgggcaaacctcgctgatgaaggattggaagctttggattcagtcggacttttacccaaaggctttaaggagaaggtcaagaccaatttccgcaattctatgagtgttgctgccttgcatcgggattccaagtctggaacccttcacctgcatcttgactgttgccgtgtggataatgacggcaagaccaacgatgttcacgatgttcacatcagagcaataagggctgcggaaattatcaacgcaaggcatggttgggagcaacctcaggaggttcgtgaaatgcgccaacaagatatagcggagttttgcgaatatacccttcagaagatggatagtttcgacattgaccgttactttgatatgcttcgcatgagaggctatgaggtcaatccaaggtatgacactactaactgcaaacttgtgggctacaccatcggcaagaatgcctcagtgttcaaggcttctgccatcggtcgaaagttcatggtatcacagcttgaagccacatggaagaagatgcatcctaagcctactcaggtcaagatgcgacctgcttcaccttccgtttcaccggctcgccctgctcgccatgttgctcagacaacgaaacctacccagtccaattctaagccattgccagttgctaccaagactgccttcaatgtcaatgttagcggtgaaatgaagagaatctatattccgaacacggtcaaggacatcttcctcaatgaggttcaggttcctgattctgatatgactgcatcaagagaggacatttctcatgtaggtatgcttctcttccttgatatgattgatgcagcaacaaccgtgtccgaatcttgtggcggtggtggttctgctccttcctctggttggggtaaggatgatgacgaagacgagcgtgagcgggctcgccgttgcctccagatggctcatgccatgtgcaagccaccgcagaaaagacgttcattccaccgttagacaaatcctacatatcaatgagaagaacaaaacatgtagaagaactcatcgaagatgacgagcagaagcctgacttcgatgacatgatgaacgaagtccaggaagagattgaagagcatgatgccgaggatgctgttgtcagtcgtgcgcctgaactcaggcagttgagtgagaacattgacaaagcgaccaacacttggatcaatgcaactcttcaactggagtctgccatccgtaagtacaattcagctcagactgctcttggcaatgccgttgacactatcagtggtaaggttgacaccatcaatacccacattgacaatgttctgaaggatgccccaaccaagttgaaggtttcagtcagagtcgatgatgttgactggaagaagattcaggacatgttcgacaaacaacatgaatggatgaccactcagatgcagaagcatatccgtgaggtcaatcaaatgttttatgaagaacgtagaagggttcaggaaaggtacaaggagtacgacggaacctacctcggacactatgtgcagtatttcttctggttcttctttgtccttggactcgttattttcggcttggctatcttcctgatgctcgacagtcactaccactggacgaagtaatctaatgtttataccctccaaaatccctacgaaacttggcatagtctaagtttgtagggatattttttttcttgaaaacgtcattttcttgaaaatgtgcactattgcccgttgtgggagccagatagcatgagtaactttgcaccgtcaaaataaacgagtgtaaacctaattgttataaagtaagcattccgtaaaccacgtatagatggttatggaatactttttatatagtccgctaaatgggaatttacaattctgatatacttcagatgtaggttgccgtttctaaagcaatataaagtttgtttaaactatggttggcattgttcaagcctttggcttcatatccatttgtatccaaaatgtcacctgtttcaaaaaaagcatacaacttcaaattgtagaagtcgcacacagattgaactccagccaattccatttctacagcgatgcacccttcttccatacgtttgcgtacaagtccttttgtttctctgatcatcgaatctgtcgtccatattttacctgtaatatatggtacagataatttgtcgaaaattatggaaagttccttgcttgcggctatatcaatatagtcggatggtgctgcaaaataatatgaacacccgtcccctctgtaactttgtgtcggtatgataaatctaccttgtgtggttgtacggtcaagactgccacaggaaccgaacataatgaactttgatgctccagttagccagcttgcaagatgacattgagaggatgctactgctgaacctattcctgacaggtagaaagttatcgtaactcctttataagttgttttatagatatgcgtatcgccattgcaagccggcatagttgcaataatttcagattcgtaggaatcaagtaaatgccgatgaatctccttcgagaatattatcaggcatatatctgcaaaatctccacgtctgccgtagaaatcaaacagattgatcattggttcagtttcaatatcataactatcagtaatcatagcatattgaatcagatgtgagttttatattgctccggtatctcaagattgaaagttctgcataataacaggacgtcgtggacatcattttcatcgtattcatatccaagatggaactgtacctgtgcctccgggtttatgcatgttacctcaatattcccgatatttcctttacctgagaaagtttcgcttgggaaagtgtatccgtcatatagaattccatcttcgacatattcgaaacaatgcagatcgattattcttccgttgtcatctttccagacagtatggctatcggtcgtatagtccattacaacttctctgtatcccttccaggtaatcacggatatggccttaccatagtctttcttctctacgaacagatcgatgtcgttatgtattcttgtttctctgcctataagtgcatcgacaccccaaccgccgtccagaaacacctttacagatgcttcagacagcatttcaagaatctcacatgcatcaaaataagtgaccataaaattgcaattaaaataaactttggtgcaaagttaataaaattccgtgagactaaagagacttatacgtagaaagttaaacatacaactgtattttcgcagaaaatactataaaatgccacctgaaaagcccacttttcgtgcacatttttccaactaaagccattttttcaacctgattgctgaaacgacaataaggttcacaatacctgattttgcaccttcaggaacgcagcacaaaatgatagaaaatgaaaatttccgttcatttccgtgttaagatatgttaagcagatgttttcattttggggtttttgaaatttttgtttccagtttgtttcttttggtactttttgctttttgggagtgttgatattcagcactttacaattcggaagcagattctcaagaagaagatcatgatggttgtaggcgcatgtatcttcctcgttgctgcagctcaggctctgcctttgttcttcggtctctaatctatcgttcaagcattaggaatacatcatgtcagtagaagtaaacgaaaatcaatacgtgagctatcccatattcaagggtctccagaagccacttgaatttatgggattccagggacgctacatcacttgggccgcatgtgccgttggtggagccatcctcggcttcatcatagcatattgcatccttggttttgtagtaggtctcgtggttcttgctgtttcactcagctctggagcagcccttatattcttcaagcagaagaagggtttgcacacaaagaaggaggagcatggtgtattcatctatgcttgttcgcatagaatgtaatcaaacaaaattcaaatgtaaacaaatgagcaagtgtgttgaaatctgaatagtgttaatcggtaggctcaccctctcacaaggatgggcctacctttatttatacttatcaaaatgaaagatttgacaatcgttataaatacagaaataggtgctcgatatgtgatgatgccatcagagttcttggtttccattgcccaagccaatgagctcatctttgtatgcttccatgaaataggcaccggcaaacttcttcatactgtctttctcttcgtagaagaagatgaagaaaatcatattcgtgggttcagtaactactcgaagaaaggtcaaaaacagatactcgatgatatgagagatttcataatcgaggacattaacaatttactttcagaaaaccatgacggcaagaatgatccatacccaatcgtacatcgctcttatttcgaccaccaggagtttgagaaacgttggtatacgttctacgatatgattacagatgccttggaaggttctgaagaaaatttcgtagcccaaaacaagaaacccaagaaacataacaagaagaataagaagaaatgatctcatacgtaatcatagcatttgtggcaatactcattggtatggctatctcagtttcagcctttggcactggaggcaaacgtaagaaaatctttcaagacatctacttctctatcgaggatgtggatggcattggcgtgctctataccaagacaggcgagtactcagccattttgaagatggacaacccagtacaaaagtattctgcaaacattgacaactactatgagttcaaccatcttattaccgcacttgcccagactcttggtgaaggctatgccattcacaagcaggatgtttttgttcgcaagcagttcaaggatgagagcaacgacaaccatgagtttttgtcggagtcttacttcaagtatttcaatggacgttcctatacggatagtcagacatacctgattatcacccaggagaacaagaaaagccgtatcttctcttttgacagcaagaaatggcgtgactttatggtgaaaattcgcaaggtcaaagaccaactgaaggactcaggcgtggaagcattctacctcgatggcaatacggctcgtgaatatgttgaccgctatttttccatgaatttcaacgacaagatagtgtctatgaccaacttcaaagtcgatgaagagtcaatcagcatgggcaacaaactatgcaaggtctatagccttgttgatgttgactgtgtcagcacaccatctatagtccgtccattcaccaacattgaggtgaacaatgtttcgatgccagtggatatggtatcattggttgacagcattccgtctgccgatgtagttgtgtataaccagatgttcttcattcctaaccagaaaagagaactctccctactcgacaagaagaaaaatcgtcatgccagtatgccaaatccaagcaatctgattgccgtagaagacatcaagaaggtgcaggacgtgatagcaagagaaaacaagcagttggtatatgcccacttcaaccttgttgttggaacgtctatagatgctgatattcagaaatgcaccaaccatctggagaactcctttggcagattgggcatccatatcagcaaaagagcctacaaccagttggaactattcgtcaactcattccctggtaattgttattccaccaacccagagtatgaccgcttcctgactctcagtgatgcagcagcctgtcttatgtacaaagagcgcattcagcatagcgaggaaaccccgttgaagatttactacacagaccgccaaggtgtgccagtggctatcgacatcagcggaaaggaaggaaagaacaagattacggacaactccaatttcttctgtctcggaccatctggaagtggtaagtccttccacatgaacagcgttgttcgccagatgtgggagcagaacaccgacgtagtgatggtagataccggtaattcttacgaaggactctgcgagtatgttggaggcaagtacatcagctataccgacgagcatcctattacgatgaaccctttcgccatcaagcgtgaggaattgaacatcgagaagattggcttcctgaagaacctgataatgctcatctggaagggaacccaaggcgaagtcaccaagacagaagaccgactcatagaacaagttatcacagaatacttcgaagaatattttgtaaagaaacagattgaaaacatgtcgttcaacacattctatgagtacagtacagtccgcattccacagattataaaagagaacaatctggcaggaatagatttggcagcatacaactatttgttgaaagacttctacaagggaggcagccatgagcttactctcaatgaaaacctcgatacaaagctgtttgatgagaccttcatagtcttcgagattgactccatcaaggacgaccctcttctcttccctctcgttacactcatcatcatggatgttttcatccagaagatgcgtatcaagaagaaccgcaaggtgcttgttattgaagaggcatggctgtgacatgtaagtcttgtatatgattgttcaactttcattccacgagttggaaatagaacgattgaacctgttgttccgtcaacagtagcctatgggaacgtgcggtattaagcaatgaacccgtgcggtaacagaaccaacaatgaagcccttccgaaaggagaagtctgaaccgtgaggggatgacaactgccgttagtatcgaacgacaggggagctaggctgaatggtatgaataacgtaatgtgaaccgttgataaacgtcgtaacttcgaatgagctgctaatgatactgggctctaacccaaaagggatgcagtcggataaccttctccatgctaaggttacacggacataacgactgccggcggatagacggattctaacccattcgtttgtcatatacaagaaacatggtaaacccgtacttctcctgttaacagcaggtaagcagaccgtaagtgaagccgaatggagtgcgggcagaggaatgcggagaaagcgaatgccgttctgtaacggaacggatagaggttgaaacatcacctcacacgaaagtgggcagacttccgcatggtggatgttttacaagaaacttatagaacttattaaaggagaaaagcaaatgaacgagattaaaacatcgtgtgcatctactgaccggaaatggagcacttgggaaagcatagactggaacaagtgtgagatagcggttaataagctacaagcacgtattgtaaaagctcaaaaggcgggcaaacacggcaaggtgaaatccttgcaatgggtgctaacgcattcgttttacgctaaagctttagccgtaaagcgtgttacatcaaacagtggcagtgacaccgcaggcgttgacaaggtgaaatggtcaactcccaatgccagattcaaggctatcggtgaactgaaaagaagaggctacaagccccagccgttaaaaagggtcaatatcaaaaagagtaatgggaaactacgtcctttaggtatcccgacgatgaaagacagggctatgcaggcattatacctgcttgcgttggaacctgtatcggaaacaactgcggacagtaattcctacggtttccgtaaagagagaagtactggagatgcaagggaacaatgtttttgtgtccttgcaaagaaaacttctcccgaatggattatggagggtgacatcaaaggttgtttcgaccacatcagccacgaatggctgctgaacaatatccctatggataaagtgatgctgcggaaatggctcaaatgcggttttgtcttcaacaaggagctattccccacggaagagggtaccccacagggcggtatcatttcaccaactcttgcgaatatgacactggacgggctgcaaactatgcttgcagagaagtatcacaagaaatttgtaaacaggaaaacgacctactatcccaaagtacatcttgtacgctatgcggatgattttatcatcacgggtagaagcaaggaagctttggaagaaatcaaaccgttagtagtagactttctcaaggaaaggggattaaccctgtcggaagagaaaacaaagattacacacattgatgacggatttgattttcttgggtacaatatccgaaaatacaaaggagtgcttctaatcaaaccgtccaaaaagagcctgaagaaattcatgcagaaaatccggggaatcattgattccaataaaggaagcaaacaggaatcacttataaggctcttgaatcctgtgataacaggctgggtaaactactataagaattgtgtggcttctgacacattcagaaaagctgactacctgatatttgaaaagttgtggcaatgggctaagagacgacaccccaagaaaggcaaatactggattgccgaccgatactttacacgggtaaaaaaccgcaactggtgcttcgtggcaaacttcaagaaaggcaagactgatgacaggattgcactgaaaaggctgtatgacacaaagattacccgatatgtcaagataaaaggtgaagcaaatccctttgaccccgaatggacagagtattttgaaaagcgtaagacttacaagatgctacagtcgctcaacggtagaaaatcattgctgtacatgtgggaaagacagaaccatttatgtcccgtatgtggtaaacccatagacaaggaacatccttggggaacttcccaacaaatagtcaatggcaagaaagtaaatttcctgctgcatgacagctgtagaagaaaagtcattcaaactaataagatgtaactatgagctggtttctattaaatagaaatttaacactgcttgagccgtatgattggaaactttcatgtacggttctgaggggggaaaggggcagtaatgcccctgacctacccggcaaagccatagcatcgccaatgatggcagagtacatcaaatacctctacaagacagcccgtaaattctgggcatcagttggtgtggtcactcaggaaattcaggacatcgtcggcagtcctatcgtgaaggaagccatcatcaacaactctgacattgtgatgctgcttgaccaaagcaagttccgtgaacgcttcgacgagatcaaggctatccttggtcttaccgatgtggactgcaagaaaatcttcaccatcaaccgccttgaaaacaaggaaggcagaagtttcttccgagaagtcttcatccgaagaggaagtgtcggaggcgtatttggtgtggaagaaccccatgagtgctatatgacctataccaccgagcgagcagaaaaggaagccttgaagctctacaagaaagagttgcaatgcgaccatcagcacgctatcgaagcctattgccgagactgggaactgtcaggaataaccaaatccctaccatttgcccaaaaggtaaaccaagccggtcatgtactgaggctcaaacccaagcaagaaaaaggtctcaatagattataacaacaagtcataaacgataattttcaggaaaatgaaacgctatctgataatatttaccctctacctctgtgccgtagtaccaacaatggcacagtactacagtgtgaactatgacaagcgcaccgtagccgaaatgacagcagcctttacaacagaggcagctaccgaggcgtattatgcccagcaggtagcaaagatacgtgaacactatcaggcagcagaggttgcagcagcaggaatcttcacttcaaagttccttgaccgcaaagccctcaccaatttgggactgtggacaagtgccaccgagaactactattaccgccgtatctacaacatggtatcggccaagatcatgccgaagatttggactgtagcaggaatgatgctcaaaagtcctcagaatgctctctattggggaagctatttatataaggtatgtgaagagaccaagactctctgctatcagttcgagtctatcgtcacaaacagcaccctctcattcaaggatatagcattcctagaaataaaccaggaacttgctgctattctgaaactctcggagttgggcaacgtagattgggaaaaggtgtttgacaacttctccgacatcggatctaacttcaccaaggaaaacctgaatgaagacattaacaacctctatgccatgggagtaaatcttgcagcagcaggagcaggcaatgccgtaggttccatccttggcaacagtaacttcgatgattcgatgatgaacaaggcaagcagtgtcattgaaatagcagagaatgtctatggactctacaataacctgtcaaccaatgccggcaacaccattttgcagtttgttggaggaagagatagcattgcaaacctcttctctttatcgaactacaatctgacatcctggataacagactatgctcgcgaaggaatggggcaatactacacccagcgatggtatatctatagagttgatgcaggaaatgtcactctatgtgattactatccaccgacagacaatgacgctgtaatcaaaggtgatcactggtatcgtatcagcacaaaggacaaaaactattcaccaacatcggcagaaagagaagctgcattgaaaaactctgaaaaccatgcaggttggagccgaagtcaggttcagcaactgaacaactcaaacgacggcttcaaatatagtatgacatactacatatcgggctatatactcagtaaaaagaaaaagcagtatgccaaagcctacgcttacgagatacatgtgtcaaagagttggaacaacaaagaagttgcctatgaggatgtctttgattcctacacgatggacttgaagaccttcaagacagggctgaatgcacgtctggcagaactcaatgacaacgaggaaggttacacttattacctttcaagtgacccaaagagatactaccagaccaccgatgcaaagaaaattgcaggatgtgaaactgcaaccatcagtgttacttgccatgacggagccaaactaggtgaaggatccacgcaatacaaatgttcaagttgcggaggcagcgtgagcggtcacaccaaacagtgtgcgatggccacaagtgtcacccatgagaacgttggcacctctgagatagacaccaagattgcggaaaccgaaagaaaaattgcctccctccagtccgagattacaagattggaagctgaaaatacggaacttctcaggaagataaagagttcaagtgtggaagacgcagcaaggtatcgccaacagtacaacgccaataaagaccgtattacagctttgaagtcagacaagaatgccgcagaagcagaacttgccgaataccaaaaggcaaagcaagaggctgttgatggtgagaatgccgtgacagatgactattaccgcatacctgccatcatgcaggattgcaagactgcatacaatctcaactggaatggttcaggggcgtgggaaggcaacacctttgtccgtacagcatccatgccaaacatcaatggtgtcattaccttcaaggcaacactctcgatagtcagaaagccaaagtatttccttggcatcaagatacaccgagccattgtgcagatttcctggacattgaccacgcagtacagcgacacgcaagttgtagcagtcataaatctcgatcctgcaaagaccgatgaggaaaaagctgacgaagtgaataaaaaactggcagaggtcgctcgtgaatatcccgactgtgacccaacagtagaatatgcaaagagcaacccagtggaatcagacgaaaccgatgacacataccatttgctttggtcaagtgatcgtctggagatagcacgtcagatagacagccgtcttaccaagatatttgcagacctggtgtcattggagaaaatgatgcactacaagcattccatcatagacatattgaaaagtgtcgcaccaccattgaacgatgaacaaggtagaagacagactctcattgagaagtgtcggaagcgatggttgagacatgctgcaaatagtagccattcggatagttacaacggaaaatatgatgacgatgaagaagataacaatgaatagcaagataatggcaatcctcatttgcctgttgaccctcttgccgtcaggagccaaggcgcagatgggatttgacgtcacttctgttgaagcctatatcaatgaccacaagcaacagcgcagtctgctgcttgtgcgctccaccttggaggcaagtaacaaactgctgcatgattatagtggcgatgccaacatcggcttcaaggacatcaacaaggaactggataagtacaccagggcatttgatgtgattgatattctgtatcagacacttcgcaccagtctcaatgtgtacaacacctacgagaacgtcagtgacagagttggtgactatagaaagatgctcaatgatttcaggaaaaagtgtctggaacgaggtaacatcatgtgtaccgacacgctgataatcactatcaacgccaaggcattggcaaagattgctgatgaaggtgataacctttataggtctgtcagtgatttggtgctatatgcaacaggagctgctgcatgttccacatccgacttgcttctcatccttacgagcatcaacaactcgcttgacaacataaagaagcatctcaacaaagcctacttcgatacctggagatacattcaggttagaatcggctactggaaaaagcaggtgtatcgggccaagagtaaggaagaaatcattagtgatgcctttggcaggtggaaaggcgcaggatatttaggctattaggataacaattaaaaactcaatgaatatgaaacatttaatatcttcacggacagcactttgcttatgtggcatgtcgttgtgtttctgcgtatcagcccagagctatgtgacatataatcatgatgcagccaagatgaatcagataacggttcaggagattggcgcaggtggactcactccagcattctattatgatgtctttcacaacagataccagaaaacagcagctcaaaagaacaagcaagggttcaggaccttagcaggagtctctgcatatcagcaggtggatattgctgacagtatcaagtcatcacttaccaaacgagcagaaatagaggctctcaacattgcagaccgacagatagaccttgcctggttagcagagggaagcaagattaacgcaaaactctcttacttccaagcaaatataaacagaattgtcagtgctggcggttctgtatctgacaaaacacgatggaacgaatactacaatatattcttgacagccatcaaagagacgcaggaagcctatatgcctaacgctcaacgcaaacagcagtatctcgccatctatgatgacattaacaggcagaacgaaacgcttctctcgtttctgattcaattaagcaacaagcggaaaacgtcctccttgcttgctgccagacttgaaaggagaaacaatgtggcaagcctcgcttcatcagctatcagtcgttggcgtgaggcaagtaaaaagaatacaggaaacaactcaggaggcaatgatgactccgatgacaacaacatagtaaaacaatagcccatggcagattcaagcatcctttccgatttcggtatcaatatcctcgaacaggagattgacgatgtgatattccagaccaacgagttcctttgtgatgctacattcacaggctcacaagggccgttttggtggatattgcagatgtgtatggctttggctgcgctgttctcgattgtcgtagctggcagtatggcctacaagatgatggtaaagcatgagccgatagacatcatgaagctgttcaagccccttgtggtcagtgtcattctctgttggtggtacccacctgcagatactggcatatctaacaatggtagcagttggtgtgtactcgacttcctctcgtatatcccaaactgtataggctcatatacacacgatttgtatgaagcagagtctgcacagattgaagacaagtttgcagaagttcaggaactcatatacacgagagacaccttatacacctccttgcaagcacaggcagatgtagcccattcaggaacttcggatcccaacttgatagaatccactatggaacaagcaggggtggatgaagtgacaaacatggagacagacgcttcaaagctttggttcacttctctcacagcaggagcagtggtcggcatagataaggttatcatgctcattgccttgatagtcttccgtatcggttggtgggcgaccatctattgccaacagatactccttggtatgctgacgatattcggaccgatacaatgggcgttctcactattaccgaaatgggaaggggcctgggcaaaatggctgatacgctatctcacggtgcatttctatggagcaatgctatacttcgtgggcttttatgtcctattgctctttgatatagtgctctgcattcaggtagaaaaccttactgccattaccgaaagtgaacagacgatggcagcatatctgcagaactcgttcttctctgccggttatctgatggcagcaagcattgtagcgttgaaatgtctgaacctcgttccagaccttgcagcatggatgataccagagggcgatactgcgttctctacccgtaacttcggtgaaggtgtggcgcagcaagcaaaggtttcaactcaaggcatgttaagcaaagtgatgtaaaacagtaaacaatacaaaatatggtaataaggaatctcgaaaacaaaatcaagttggtgatgatcatctgctcactattccttgtgggttgtatcatcatctgcatctccagcatttggactgccaaggtaatggtatcggatgcgcatcagaaagtgtacgtattggatggcaatgtacctattctcgttcagcgtagcaccatggaagaaacactcgatgtggaagccaagagtcatgtggaaatgttccatcattacttcttcactcttgcgccagatgacaagtacatcaaatatacaatggacaaagccatgtatctggttgacgaaacaggtcttgctcagtacaacacgttgaaggagaaaggcttctactcaaacatcatgggtacgagtgcggtgttcagcatcttctgtgacagtatcaagttcgataaggagaagatggagttcacctactatggcagacagcgcatcgagcgacgtacaagcataatgaccagagaacttgtgacggcaggtcatttgaagcgtgttccccgtactgacaacaaccctcatggattgctcatcaccaactggagaacccttcttaacaaggatgtggaacaaaagaccaaactgacatattgatatgggatggaagaaaatgctcgtcggtgaaaagatgccagacaaggacgatccgaaatatcgccagagatatgagaaggaggtgaaggcaggtcgcaagtttgcaaagactatgaagcttgacttacttgccggcaaggtacaactgtttgcaaatgaccacaaacggttgttcctgtccctcgtctttggattcatcattctcagttttggtctaaacatctataggatggcagtggtgtacagtcaccagcagtcaagacaaagtgccaccgaaaggcaagaacagatgttgcgtcagaggcataacaaggtcagaaaagcagttgggaatgcctacgccacacttcctgccatgaatagagataatcaaaagaataataacgaaaagatagaaaacgatggacgcactgaaaaagattaactggaaacagccaaagtatatgatacccattatcatctactttcctctgttgtttgtcggttatttcgtcattgacctctttcatacggagaaagctgagattccagacggtctcacaacgacagaatatcttaatccagacctgcctgatgccaagatgaagggagacggcattggaaacaagtatgagagtatgctaaaatcatacggcaagatagacgattattcagctttaggaaacattgaacgcaatgaagaagacaccaaagaagagtacgattcaaaatactcagacgatgaacgtaaacaacttgaagcccaggaagccgagaaactctctgagatgcaaagacagctacaggaaagcgcacaaaagggccaagaaatcgcaaaaggcgagggcagttcagaaaatgaccgcatagctcgtggcaaacaacgtgagcaggaagcgatggaagaactcaatcgggccattgctcaggcaagaatgcaagctcagcaggtcactactccatctttgcaagctgaggtcacggccaaaactggtgattcacaggaagaaaagacggaagttccggaaaagaaaaagaacaatgacgatgaaccgcaagaggttgtcaagaaggtaaaggtaacttccgactacttcaatacgctgtgtgataatgacaaggaaccagggcttatcaaagcaatcatagacgaaaacatcaaggcggtggatggatcaagagtacgtcttcgtcttctcgatgacattgtcatcaatgatgtagttgttcataaaggctcctatatctatgccactatgagcggattcggttcacagcgtgtcaaaggtaatgtcaagagcataatggtagatgatgacatcgtcaaggtaaatctatcactctatgatactgatgggcttgaaggactgtatgtgccaagtagccagttcagagaaacgaccaaggatgtaagtagtggcgcattaagcaacacctccactctcaccaataccacatccactgcaggttcaaatctggctacatggggagcgcaagccgtcagcaatgccgtccagaagacaagcaacgctatcagcaaggcaatcaagaagaactcagccaagctgaaatacggaacattcgtgtatctcatcaactcacgttcaaaccagaaagataaataataacgagcaaaacatatataaaatatgaagactatcaagaaattctgcgcattggtagtatgcgcattagcctccctcccatcccttgcacagcagacgtatcaagaaatggagcagcttaccatcaatgagaatgtcacaactgtcattaccgcctccgagccagtacgcttcgttgacatatctacagatgcagtcgttggcgaccagccaatcaacaataccatccgtctgaaacccaaggaaggtgctgatgtacatgctgatggtgacatattggctatcgtcactattgttacagagcgttacagaacccagtatgctttgatatacaccacacgattgcaggaggcagttacagataagcagatacttgcctctgagaagattccatatcataatccttctgtatcaatgagtactgaggatatgaccagatatgccagaaagatatggaactcaccggcgagaatacgaaatgtgagcaccaagcagcaccgaatgaccatgcgactgaacaacatctatgctgttggcgaatacttcttcatagatttcagcatcgagaaccgcaccaatatccgctttgacatcgatgagatgcgtatcaagctgaatgacaagaaggtttctaaagctacaaatgcccagatgattgagcttactcctgctttagtacttgaccagtccaagaccttcaagtatggttatagaaacgtcatcgtcctgaaaaagatgacattccctaacgacaaggtgctatctatcgagacttcggagaagcagattagcggaagaaccatcagtttggatatagactacgaagatgttctgtatgccgactcattcaactcatacttaatgatggaggaataagacgatgaagaaatacattttgtcattgatgatgggactgtgcgtttcagtctcatcattcgcccagagccatagcgaccgaatatccgttggtgtaggagccttgtatcagagaggtctggatgccacaatctcatgggaacatgaaacacgctaccataatgcctgggagtacttcatcaacggttacattaaatgggatgaatgtgcatcatgcggacatgtctgccctgagtcgttttggaacaactaccgtacatggggagttggtgttgcctataagccctgtgtgacaagaggaaggaacaactacggaaacctccgtattggcgtaagtgctggcagtgacacagacaagtttgttggaggcttgcatgttggctatgaacacaactttgccctacgtaatggatggggattgtttgttcaagctaaatgtgacctcactcttcccaagcgagaagacttgtttcgcactggcatcgtgataggattcaagatacccacactaaagaaatagcaacaatgaagatactaaatatcatttgtactactctcatggcagtagcatttgcctcatgtgatgagcatcgagacttcccagatacggcaatgaagacctgcgacatcctctgtacggacggcaaggttgtaaggttcgaggaagttaagtcacaaaacaagactcctattgccgtggtgttctatgtgaatcagaacgaggacatacaaggcacaggctatgctgtctatctaaaggacattgagccgtttgcatactcagactctctcggattgaagcataacacatcagctgacattgtagcatttgatggcaatgacaatacccatgctatgtattccacaggcacttcacctgcagcttcagcagtctttgacatgtggcaatacggtcagagtgcctacatcccttccgttgctcagatcaaacttctgtatcaagcacgtagtgcggttaatacgtatattcgcaagtgcggaggcgatgtgattccagacaatccggatgagtgttggtattggacttctacagaggtgaaagaccaggaaacagccaaagcctggttgtactcgttagcatcaggagcgcttcaagaaacaccaaagacgcaagcacataaagtccgtccaatcattactttatataattagcattaaatattcactataacacaagaataaggtttcatggaggaaacaaaagaattacagaccatgtataagatattccgctgtctgatctacttatcattgatagtggagttctttgaatatgctatagacccagcgttgcttgactattggggtggcattgtttgtgacattcatagccgtgtaaagaggtggttcatatatatggatggcaaccttgtatggagcaagattgctaccatcgtgcttatctgtatcacttgcattggcacccgaaacaagaaacatttggagtttgatgctcgccgtcaggtgttctatccgttggtgggtggactgttcgttaccatactgtctatatggcttttcggtcatcgtatggatatgaggttctataccatcagtctgaacatctggctttacatggctgcctctattcttggtaccatctgcatccatgttgccctcgacaatatctccaagttcctgaaggaaggattgctcaaagaccgtttcaacttcgagaacgagtcttttgagcaatgccaggaactgcaggagaacaagtatagcgtaaacatcccgatgcgctattactacaagggcaagttccgcaaaggttgggtgaatatcgtgaaccctttccgaggaacatgggtagtcggaactcctggttccggtaagactttctccatcattgagccgttcatccgccagcacagtgcaaagggctttgctatggttgtctatgactacaagttccctacgcttgcgcagaagctgtattatcactataagataaaccagaaagccgggaaggtgccacaaggatgcaagttcaatatcatcaactttgtggatgtggagtattccagacgtgtgaatcctattcagcagaaatatatcggcaaccttgctgcagccagtgaaacggcagaaaccctgttggagtctctacagaaaggcaagaaagaaggtggtggcggtagcgaccagttcttccaaacatcagcggtcaacttcctggcagcttgtatctatttctttgtcaactacaagaaggtgccatacgacaagaacggcaatcctcttattgctgagatgacaacagagccaaagactcatcgtccgaaaccaactggtagagtctttgaccataccggtagagaggtggagccagagtattggctgggcaagtacagtgacatgccacatatcctttcgttcctcaatctcgattatcagaccatctttgaggttttggaaacggatcctgaggttgctcctctccttggcccattccagactgccatgaagaataaggctatggaacagttggaaggtatgattggtacactccgtgtctatacctcccgattggctaccaaggagtcgtattggatattccataaggatggtgatgactttgacctgaaggtgtcagatccgaagaatccttcatatctgctcattgccaatgacccagagatggaaagtatcattggtgcgttgaatgctttgattctgaaccgcctcgttactcgtgtcaataccggtcaaggcaagaacatacctgtcagcatcatagtggacgagttgcctacgctctactttcacaagattgatcgacttatcggtactgcccgaagcaacaaggtaagcgtggctctcggttttcaggagctgccacagcttgaatctgactacggcaaggtaggtatgcagaaggttatcaccacagtcggtaacgtagttagtggttcagcaagagcaaaagagactttggaatggctctccaacgacatcttcggaaaggtggttcagttaaagaaaggtgtgaccatagaccgtgacaagacctccatcaatctcaatgagaacatggacagccttgttcctgccagtaaaatctcagacatgcctactggttggatctgcggacagtcagctcgcgacttcataaagacaaagactggacgaggtgacagcatgaacatccaggagtcagcagagttccagacctcaaagttctattgcaagacggacttcgacatgaagaagattgctgaggaagaagctgattatgcgaactataagataccaaagttctacaccttcccatccaaggatgccaaggagcgaatcctgtatcagaatttcgtgagtgtaaacctcgatgtcaagaatatgattgacgagataaacaaattcaagataaaatgactttcagaaagataatattatccctcttcgtaacattaagcatggctgcccatgcacaggcacgattaccgacagaaaagcagccatcagcatcggcttctatattcgagttgccaccatttgagcgagccatctgttgcatccgattctatgaaggattgcatcgtgccaaggactatccgtatgtaggttatggtcacaaacttagaccaggcgaacgttattcatccaatatgtctgcaaatgaagctgagcaacttcttcgtaaagacctcaaagagttatgtgctatgtttcgttcctatggtcaagactccctactccttgctgcattatcatataatatcggaccatacaaggtgaccggatataatggcaaatacccgaaaagttctgtcttaaagaaacttgaagttggcaaccggaacatcagagacgattatgtaaaccattgccattggcgaggaaaacgaatcccttccattgagcgaagacggtatgcagaactcatgttattatttactccatgacagaaaacgaaccaatcaaaaccgtatcagacggtatcacattcctatccactggcagatactacgatggtatcaaccagtgggtagctcataaactgaaagatggagacaatgatgccatagactatgctgcacgccagatagcaaagctgttaccacaaaatgctgttcttgttccaatccctggtcatcatggcaaagccgaacataccatgcagttggcaagggctatctcgtcatatactcacctccctatcgttgatgccctccgtggcatagagcgagactcacaatatgatgccaagaaaagaggtcagacactttctggcgaaaacatgggattttatagacaaaagagcctatcaacaaaccgaatcccatatatcgttgacaatgtagtagacactggaaacaccgctaaagcagctgctagagcacttggctgtggtatagtaatctcttttgccatgagtgacacattacttgagattcaagacgtttcacgatcgtttatcagataagtgactcactttctttttctcaattcctcatagagtttatgtttatcttctatggaagctgaacctcctaaaccttcaagatatttacgtacatcagggttcttgattaggtagttagcgtattctctaaataaatcttcttgatagcaagatttcaggtttagagatttggctttgtctaatatatggataaacggaagtttattttgcttattattgaaaaatttgaatgtttttggtgaagctttcaccctttgggcatactctttaacagacgaagtgatgtgatactttggattatacaccaacagttcatatgcttcacttgctatgagcttattgatttcttcgatctcattttgcttgttaataaccacttttccctttcttgtacctactttataaacatcagagtcataaaacattattaatagttttggagtaagaggcatcattatacataaacccttgtagcccagcgttttgactccaggatatcctaaataatcaaaataaggattagctaaaaaatctggacaatcagatattataaaactataatcacaattagaatctatgtttactattttaaatgctaaatctgcgacatacactatcattccagcataaacacttaatgagaacaaaggaggttcatcaaaacaaaatactaaatgaggatcaatttcttttatgccagaaaatcgcttaaacatttctaatgttatcttattaacatcatcgccaagcatttttgacatatatgcggtacgaccatgttgtatcattaaatagactaagatattcaatcgctcaacttcatgtaagttataatcaggattatccacaagtttgtgaaatgcccacatacaatatcgttcaatatcaccaagagcatcttctatcttttcatcctttgaataaaagtaatctttactcatcgtatttttgatagaagattggttgaaagtgatattcttcttaatgttatagataccaatgctcttaccatcgtttgagaataaacgctgataagattggggtacatagtgatggtttttcttttctgccatatattagtattcaaagatccaatcaagattatcatatgggcaccactttgcgtaaagttcgtttatatagtaagcaacgccaaagcgttccttgcccacctctttagcaaacttatatagtctaatatcattttgcctttcgagtatattcattccagcctctatccattgcccaatattatcaccttcttcgtgtagcatcatttctccatgccaaaaatcagctttatgtgtaccttcatactccttaggcatttccgtattcacttccgaataatacctactgaggtatttatatggtgattccagataaagccaattgtgttcaacagaatataaagcttcaccgatacctgttacagatgaaccattctcatcggactcttgaacatcaaatattcgataagtcccgtcttccaattttctaaatctaaatctcccaagaagaacaaagcttctgcaaacatatatccatccattatctagatagaaactgtatcgatcttcccatccgggttcaaacgacttgatgatacgtcgatgtaactcaggagagatgaccttttctttaaaagggtttgttatatgagtgaagtgatgatattcgatattagtacgagcatcattctttgcccaaaatactcttgcccattctttttgtcgtttaatctttgatatagttctatgataccgttcattgatcttcactggaatgcaaatatcattgacacaatgattttcatcagcgtatttcttcttgatgaagtagttgcgacatccgtacattgcttcagcgatagctcctgttaatgtacccaaaagtcttttgtttcctttcattctcatgacattatgcaaagcactaccgaagtcgaaagcattgtaaaatgcatcccaagctctgagaatgtaaggtattggagattcttgattccgccagtcccaatcgtgacggcaacctttgaaaaaacctccaagttctgcatagacttcatcctttgttttaccatttctcagcaagtatattatcttacgaaggaattgtaaggagtaccatgcttctttctcaaggtcttgttcaaaaattagaccgcagttgttctgacttttctcttgataccatgcgcaaggaatcactcttaccattgcaattcctatgaccattgtattatagttgtagttatagtcttgcttttcaatccattctttaactccttcagagtagcatacgacatcgtcattgacaacacgaaaccatgaacgaatgtattcctgatattctgcttcgttcatgaatagattaaagtcaagtgcatctgcagttgcaagcacagaaagaccatattcagagagcaatgctttctctgaaatcaaggataggtaaaacttctcatgatcgttttcccaagtccatgctgctaagtcgccaataattgcgccaatcatacaaagtttctgttatagtgctactcaaagaatttattgatgaagtttatctgttcattattgagaacagaatactgaacatatctgctgatgcctatcgattccagttcattatatccaagttcttcgccttcatacatggctgcaacgggagtgaactcaaaacaatcattatcaggaacaaatggagccaaccaacatttttcgtcttgtcttggtacgcttgtgctggttacttctaatttgtatcttatttgataatgtcctttacctgacataaaaagatacacgatgtcaccaacattaagtttcttgtcagacttacgccaatagagcttgccgtataaagcaacactctttgtatgatcgaggaaacgttcatttcctttaagtaatacgtgcttaattgtattcatatcaatcttctgaacctttgtgtttaatatctttgaaaaattttgccatgactatcaatcctggatatgctctatcattgtcataataaaccatatctttatccatctcccatacagacataaaatctggagatacaactgtctttaagtctttgtaaagtcggtcaagcatcactctttcttgtgagatataagtctcgcgtatattgtcagagggatttgtgctgctgtgagacgtaacgaaatgcagaccaaggcgaattacaccttttgttttttcctcaaagtgttttatctcatctttcacatttccaagttgaacaatattcatggttctccatctttgcagtaagcgctcatcgtttgtgcatggtgtttcgaaattgtcgtaactatgcttcacttcaataacaacgctgtagtctttataaatgcaccaatagtcaatacgtccttgagagttctcaatttctaatcccttctttttgctgtttcgagtcatcggatattcagcaaacgcaagtcctttgcagagtgaaaccaatactggcataatcagagtgtctaattggcgttctctaaagacaaatggtggctcataaatatcatacttggtagagttgaaagccaatgcatgtttagccatacctatgaaaagtttctttgtcaattcataggcaacaccataatatgcttcatcagattcctttgccgagaaaagaaagctttgggagtttcttattgagtgacgaaatttcataccaacttgaaaattaggttattctacttctattagttttttgagcgtactatattcaggttcatctaacatgaaaatagtgccattacttcctaatctaattgcattatagcacagtttcaatcgatgtagcattggttcaattatcccttgtgtcttttttatgaagtcttcgacctcgcttttcttagatggtaacttataacctttattgctacttgctattatcacaccatgatctcggagtttggctataattctatttcggaaagactgagttgaaagtctttcaaatccctttcgttccaaatcattttgcagttcttgtgttgaaatgtatctcctcacagaattgttcatgaaacggaataaaagatagtcaagaactgcaatttgcatttttgaattttcatcagcgtctttattctcgaattcctgcttgaatgccaacgcttttctaagacataaattagcgacagttgcatcatcccgactatcaaaattaatctgatcttccacacggaatgttactgggtctcttggaaactcctgtattcctattattttcttgcctaaatatgttttgtagttagaaccctcagccttacttttcttgttttcatcatagcagaatgctaaacatccagacataatgtctgctaattgaacaagaacaccatgttcacttttattaaaacggaaattaaactcatcaaataaagaaagagcaggattatggtcctttatatattctgaaaatgattgcataaactcattgctaccagtttcatcagcaactatggtgagtttctgaaaacttttttggagagcattataagccatctggttcaagaacttataaaacgatgtttttattctaagtccactctgttcatatatctttcttttgtcaacaacaagatagtatatattaaacggcaatggcatcaaatcgtcgagaagttttctaatacgagtgtgattgtttttaagatgacttgatttcatctctcctgtctgaaaatgttttttacgtactgcttctacggagtcacgtagagcagacatgtcgctgtcattcactatgatggcagtgataataaagtgagttgagacgttaggtttttcaaaagtaaagccaaaggctccgaattcatcacagaaagcgtattgcatataatacttcaaagtttgattattaaacaaacatttcatagtaataacagtcgtgtacaactggcaaaacagctgattaacaactatattcagttgcaaaaatactaataaaagacgagtaatatgcaagaaagtaaagaaaatgcaatcaaataaaagaaaattccgtagtttttcttgttttttgcagcagaattattaaatttgcataatacgcaatataaatggttgtatctttcacaataaaacaaagattgatccgttatatgtattaaaggtataaagcatgtaaaacctaagcaatatggcaaaggaaaaagattttaatagactcaaagttgtactggcagaaaaaaagcgaaccaacaaatggttagcagaacaacttggcaaagatcctgctacggtgagtaagtggtgcaccaactctgcccaaccaggattagaaacattgtatcaaatagcgtcatgtcttgaagttgacgtgaaggatcttcttgttcccaacaaggaggaaaacataattatttatagaaaataaaactccaatttgaccaaaaccgataaaattagtttcaatgttttgactatccaaggatgaacacaagatggactaacatggatatggttgtatagatttaaaagcataattttgcatgatatggcaaactcggacaataacatagcttctcagaacgaaattgttcttggagaaaacgaaatggtatgctcactcaccaatcgtgtagtgaaagcaactgataaggaaatgacattgcagtcaatgattgcgatgatgacagaagagtatggcttcgccccagaagacatggagcgtgactttaaggtgaagtacgatgatgcggaaagcggaaagacaaaaacacagaaggtggatttggctatctttaatgctgggcacgctcatgatgctgacgaactcatccgtttcattatcgttgccaaagatgccaagataaagcccaacgacaagaaaaatggcgtagaagctactacagaaaacatcttatgtaccacggactgcgagtttgcctgttggaccaatggtgaagacttacaatatgtacatgctttcgaagacgcttttggccaggtaacttgtgaggctatttctgattttcctgcagagggtcaaacccttgaagaccttgaagcacaaggcgagcgagctataccacgcaaaccagctaatgagtcgcttgttaaaaccttcaagcgttgtcatgattatatctatggtaacgagggtatgaagaagactgccttttgggaacttctcaaccttatcttctgcaagctctatgatgagaaacgtcgcttctctgatgcaagagaaggtatcagctaccgtcgtcgtttttgggtgggagtaaaagaacaaaacacgccagaagggcagcatgaagtagctgagcgcatcaaaggtattttcgaggatttgaaggatagcaatatcttcaaggatgtgttcgacggtaatgaacagattatgctttctgaccgtggccttgctttcgtagcaagcgaactggcaaagtattctttcctggatgctacggttgacgtgaagggtactgcctacgaaaccattgtgagcaacacgctgaagcaggaggctggccagttctttacaccacgtaatattatcaaatgtatggttgagatgcttgatcccgaccagaattgtcgtgtactcgacccagcttgtggttcgggcggtttccttgtgatggtactcgaccatgtgcgtcataagattgcaaagaatttctatcctgaacttgacgacattcatcttgaagccaagctcaactccgcagaagtggacgacgctgtgcgtgagtatgccgagaagatgattttcggtttcgactttgacccagacttgaagaaggctgcacgtatgaatatggtgatggctggtgacggacattctaatatctataacatcaactcgctcgactatccttatggtagcaaaccagacgttcctcacattgccgaagctgtaaacgaaagcatcaagcatagtgctgatcatgacttccattttggcacttcggaaaacaatgcgcatggaaagttcgatatggtatttacgaacccaccatttggcacaaaagtagaagtagatcaagagattgctgcacgttatgaactgaacagcaaagctccagaagtgctttttatagaagcttgctacaacttcttgaaacccggtggcaagatggctatcgtgttgcctgatggtatcttgggcaatccgaatacagagagtgtgcgtctgtggattctgcaacatttcaaactgcttgccagcgtggacttgccagtagagacattcttgccacaggtaggcgtacaggcttcacttctcttcctccagaagaagacagacgcagaaatgcttgtacctattgaggacgaggactacgatgtgtttatggcaatcgtagaacaagtaggcaaagaccgtcgtggtgttcctgtttacgaaaaggacgatgacggagcagaaattctgtttgagcattataagaaatggctcacttacgctgacaacggacgtgagatagtaaaacaacgtagagagcgcatcaagcacttggcggatgatctgccgaaggttgcgaaggcgtataaggagtttaagaagaaaaaagtatgaaataccgccaacttaacagtaaagaaatacttaagagtaagagatttgacggaagttatcacaatgcggatgttaacatctacaattcggtaattacaagtcattcatcacatacattgtccttttattgttccgagatttttacatctgggagaaataaacgtgtctatactaaggctgaatttggagatccctttttaagtaattctgacgcttcgtcttcagacccatttaacacatgcaaatatagttcaaagaaatatggatatgatgaatctgcgttattgaagggtggcatgatattaactggaagagttggggctataggccaaactgtttttgttccaaaatattgggaaaaatatcgagcacaagggtctgataatattattcgaatcgttgtaaaacctcaatttaagaatggttttatatatacatatttggcttcaaaaataggaaacttgtccttttggaaacatgcaacaggaggtgttcaaccttttattactgataaaatggttggacagcttcctattcctgatttttcagaatccttccaacaagaagtagataatttgatgcaagaagcgacgagattgagagaagaagctatggaggctttggaggaggctcaaaaactaatagatgataagtttgcccattgcagaatacaaaagggaaactcgatttcagtcaaaacgattataagttctcacaacacaagatttgaaggtcagtattatattagttccaatcgttctgtatatgattacataacaactcattgcgaatataagttgttaaaagaattgagtgagaaaatattccgacctggtatattcaagcgagaatatgtaaaaaaaggtgtaacatttcttggtggtgcagacatcatgatggcaataccggatagcaataagaaattatcctttaggcaagtagaaaatatgcctgagttacttgttcaaagaggttggattcttgtaacatgtggaggcactattgggaatacggtttgcatcgacaatcaacttgcaagatgtgctatatctcagcatgtgatgagagtagtccccaaagaaggaacgcttaaaggatttttgtatgcattcttatcatctaatacgggacatgatttaataaatctctacacatcggggtctgtaattccacaaatagaagcacatcacttagaaagagttcctattcctatattggaaaaagaaattatgattcatataaattcccttgtgaatacatacatttcaaatttggaaatgtctaaagtgaacgaaactaaagccatccgcatggtcgaacaagaaatcgagaagtggaataaacattaaaagattgcattatgactgaagatacttttaaagacctgtgtctttgtggcgagaccactaaagtacagtttaaggaagcgtttacttcgcagaaggaaatagcaaaggaaatgatagcctttgctaactccaagggcggagtcatcctctttggtgtggaggacaaaagtggtaaacttgtaggtctgtcatacgacgagatacaagttatcagtcgtgaacttggtaatgctgccaatgagcaagtgcgcccaacaatctatattgatacagaggttgtacgtatgaatgaaaagcatttccttatatgttctatcgaggaaggcaaaaacaagccatacaaaaacctcaacggagaaatctgggtaaagcaaggagctgacaaacgtcgtatcacagagaatgctgagattctatcgctgttccaagactctggtagctatcagccagatgcagcaggtgtgaacggaacaacgtttgacgaccttgaccgatatgccattgatgactaccttcaaaaagtttacgccacaacattggacggatttggaggcaaagcagagcaggtattgaagaatattcatattcttaaccataatagcgtacctacactcgctggctacttgttcttcggcaaacatccagagtataattgcccaacttgtatggtaaaagctgtatcattcttcggaaacgaccttgcaggtacacaatatcgtgatactaaagaaatattgggtaatatgccacaactttacgacaagagtatggcatttctcaaagccaatctgcacaatgttcaggaagaaggtgcatcgttcaatactgtgggaaaattagagattgctgaggaagtattagaagaagttgttcaaaatgcacttgtgcatagagatttgcttcgctccgctcccatccgcatcttaatatttgacaatagagttaaaattatcagtcctggagcattggccggtggacttaccgaagatgacattcgcaatggcaaaacctatcaacgcaatccttacatggccacctttgccacaaacgccttacattataaaggtataggttcaggtatcgttcgtattcttgccgaatatcccgacatacagttggataatgatgatagtgcaaaagaatttaaagtaactgtttggagagctaaatccaaagacgaaagtactacccaaaagagcgaaagcgctacccaaaaggaatctttgaaggatataagcactacccaaaaggacgaatatgctacccaaaagagtgaaagcactacccaaaaggatttggatgctacccaaaagaaagtgcttgagttcttcaaaaataaccccaaaggaaccagagtggaagctgctaatgctcttggcgatataacagaggatggcgtgaaattcgttatcggcaaactacagcagaaaggcctactcaaacgtattggcggaagaaagcacggagagtggcaagttctcatataaaatgaaacaatatgtcacagttaaggaaagaaacaatagaatgtccacattgccacaaggaaggtgaatttgacctttggacatcggtgaatgtggatttagatccagagctcagggaaaagattttctctgatgagctattcttgtaccattgtcctcactgtggcgaggttactggtattcctgccggtacgctctatcatgacatggaacacaagtttatgctcttcttcgagttctttaagccggatggatatgactatatgccaatggaattgccagatactcttggcatggataagaactacacattccgtacggtctttgacttgcaacgcttcaaagagaagattgtaattttggaacatggtcttgacgatgttgccatagagcaccaaaagtatatgataagccatatcatcatgcctgaaattgcagagaaaggctacgagcttttctttgcaaaacaggaagagcctgatgaggagtttcctttgggtaagattttcttcttctataacgacgaggagaagcaacaaaccatggaagttcgatttgctatggacaactactatgagcacaaacttgcctgtgaacttgacccacgtatgacaatcaaaggctgcatgtgtgtggacgaggaatggttagcaaaacaactaaaggaggaataactatggcagataatctatatgacttcgacaacaacggtcttgcccgtgcatataaagattgcaaatgggcactttttgatagatgcggaaaccaagttggcgagtggtattcctacattgaagaatggggtgaaggtttttacaaaatagaacaaggcgcaaagaaaaacatcatgcgcccagatggtactgtggttctgaaggcatggcacaatgatgtcttcaaggtgaagcatggcttcttcctattcagcaatacgatccgcaaatcgaagaataatccaaagactcgctacacctacggattggcacatgtaactggtgatgttatattccccatgattttcgacagtgcagactggcttgaaaaaggcgatggtatctatgcggaaataaacagcaaaccctatatactcacgcttgacggaagtgtatatgacccggcacgtgaccatcttccacaaaagataaacattgactataaagaactgtttgagaaatttgcaaactggacattaccaggattgcagtttttttacagagatacagatgctcctgtcgtaatagatacaacataccatgtaggtgatgttcttcgagcaggtttctttgttgatgtcaccacaaagttgtacagacctgcccacaagactcgttttcttatcgcaagtgcacatgccgctatgatgtgtgaaattgaagagctatgtcaacagaatccagatgtaaagaaatggaacctgtgtacgttccacttcaacagctatttcaaagttatggacgtgtatgagaaggacggtgtaactcaagtgttcctactccatatccctgcagctgccgcattcttcatcgggcatgacgagacagccatgaattttgtaaatgaggcaactggtcaggaatcttcacttattgacatggcacgaaagagccttgacgagaagatgcaaatggaagttcacccacgttctcttgataaggaattctgtgctcgcatggagcatcctatcggattagacgatgacttctatcctgtacctctaaattctgctgatgaaccagaagaaggagctatagccaatttaagcaatatgattcacaatttggctgatgatgcagacattcaggacttcatcaatgtagaagacaactatccttatcatggcgttgaaggctctgtttgcgaaggctgtatatatgcaaatggcatacaaggtcacggagaaggatgtggtagactctttataaagagtttccgtgagcgttatcttaaaggcagatgcgaatatcgcaagacagacattatgagtccatctcttttcgaagaaatggacaaatatcataaaaggaaagagaaagacaagactgagaaatcgaccgacacctttgccctaagagttgtaagacgattcattgatgagcatcttgatggtgacataaacaaacttatgcacacagatctttacgcttttcaagaagacaataatggtgacacggagttgacaagaacaaatattattcgctcgattatggctcttgttttttcagactcttggccagaccttactgttcaaaatatcgagcagtacaactattgttgttcgatgatgaatgaagatgtccggctatctggttcaaatatcgcagaccaatatatgatgggattgcaaaaattcagtccatcaaaggaattaaatgagcgggctatacgcacgaatcatttgctgcacactataggaaacttctgggtgttgcccaataaacgaaacgacaaggacacacttagcaactataaagacacgccccctcattatcgaggatatatggacaagtatctcaaagctatgtatgtagccattagcggacatggaaaagtggacatgcgtatgaaaggtcttctttacaaaaaccgtaaactcatgaatgattatcaaggattagatggattcaagcgacttgttcataacctaatgcttgaggaatacatggatgagcagagtatacctaaggatatattccctatggtatggagctacatgaaaggattggatagagatacgtatctgtctgcagttgcatcattctgcgatttttgcgaatacgcaatacccagaagatcgcaacgcattatcgaaaaacttagcataatacttaaatcaaatagataaaaacaacataaatatggcacaactgagaaaaccattacatgacgatggtccagtaaatgttggtgaacaacgtttgcttgactttctgagtgtgaagttgccaaacagctatatagtcattccaaatctcaatatatctataaccggtcctaaccgagtgatgaagtattgggagtatgactgtattgtggtagctccacatgctgtttatcacattgagaataaggattgggctggtaatctcgaaggagatgactgggcttggttccgtagtggacaagaggtagcaaatcctcataagactgcgggtttgaagagccgtattctcgcaagcaagataaaaaatcagcacccagactggcgtttcgggcagatactgacagctgtaaccctaagtcatcctcagcagtctaagtttggattggatcctcaatgtgattgctacaagcagacattcacattgggtggcgaactgatagacttccttaccaagcctgaacttgtaggtcgtactccaggaatgattatggatattcagtcacagcttgttgacttgctctctggtcaatccgtagaacgcagacgaacagagcgtaaagagatcttcaactacctgattaaagaagttcttcaagagacagaggagttcacagaatatctctgtgtaccgaagcttatagaaacagctcaatataaagtgcgtgaatatcctcttgacgttgccggaaagagtcctgtagaactgcagaaactgagcctgactgttcagaatgcaagcttcgcacaggaaaagatcggcgtatctccttatattgtcaagacagactgccgaatgaatgaggagcagacttattactatgagataagtcgctaccaagacgagagttcactaagaagtaagcttcgtcagaagacattcaagcagacagataagatcagcatcatccttgatgtagccaatgcgttgaaagcagcgcataaggaacaagtatatcatcgtaatgtttgcccagagaatattttcgtttatgaaggtggcaaggctgctttggcaaactttggtatggcatggtttatcgaacattcagacctcagcttcacagttaagcatgacttcaatcttaaattgccatatacagcaccagagatcttggagggtgacgtttgttcaggaagtgatattttctctcttggcgttatcttctatgaactgatgacaggcaagctgccttttgacagctgtcttacatttacttccgcattaggaggtgtgcttacagaagatctcatgccaagcaaggtgtctaaagaccttccagaatggatggacgaggttgttaagcacacgatcattgcagatccattccagcgttggcagaaggcagatgaattaattgagttcatcaacaaatcaatggatgaagagcagaagaaaaccattaaggcacagaacacccagtctaacaataatactccaggtcagacaaaggttgcatacctgaaagacatgaagccaggtgtcaaggttactccttctatgacccttcatgagattcttggtagaggtggtttcggacgtgtgttcaaggtgtggcacgatatgcaaaagcagtatcttgccatcaagatttttgagcgtgatgcctccgttgacaatgccatcaacgagtttgaggcattaaaatcgctccaccatcctaacattgttgagttcaagtttaacgaccgcactcaacagggactgttctataccttgatggaacttcttgaaggggaaaacctgcaagactacacaagaggagatctccgtcttccagttgatgaagtctataagatggcaacacagattctgaaagccctccgctatatgcaagaggatcagaatcctccagtatatcatagagatattaagccaagcaacatcatgtggcataagcgtcagatctataagcttattgacttcaatatctctacaaccaccgacgataagtcattcggtggaacattcccttatatggctcctgacctggtcatgtccggaaacaagattgactgggataagtcggccgatacatttgcattgggtatcactatctatgagctccttgcacatgcttatccatggcctggaagcaatatgcgccctaatatccacatgcagccaaccgatattcgcagctataatgataagttgaccgatgagattgctgactttgttatgaaggctatcatcactgatagacataagcgattcacatcagccaaggagatgttagaggcattagagaagattggtgtaaatggtattttgaaggacacttcaaccatcataaacacctctactgtcaatgcaaatcctgtggattatatcaattccctatatagccagagtcgtcatggtaatagcggtacacgcgcaggagcgaaatcacatgtttttgatgacttgacctattcaaagactaagttggataagcagcttattcaggacatcaaggatttaaaatataagctgattatcattacaggtaatgccggtgatggtaagacagcctttatccatagaattgaagaccagggaatcaacaaggaatcattcgataccaataacggttcacagttctttattaacggtgtacgtttcgagtcaaactatgatggctcacaggacgaggatgacaaggccaacgatgatgtattggcacagttccttgctcccttcaatagtctgaatgactatactcaggcaaatgaaggtcgtgtgattgctatcaacgaaggtcgtcttgtggacttcctctctactcgtccagagctcagagaccttcaggataatattgaggaatatttctatcaagaaggtcatgcagaacttcttccaggacttatggttatcaaccttaacctccgttcagtaacagcaagagatggtaattctccaagcctattagctcagcaggttaagaaactgactcgtccagagttatggtctaaatgtgagggctgtcctatagctgaccgttgctatattaaatataatgtagacacattccaggacagcagtgctggtgacgaggttatcaatcgcttggaatggcttgtaagaaccatcgtttataagcgtgagctccatatcaccatgcgtgacttgcgttctatgattgcttggatgcttacacgtgactactcatgtgatgaggtcaagcaattagttgagtatgttcagagtgagcagctgcctgaatactattggcagtactactacttcaatgtaacagctccagtagcatggccagcaaaagacttcatgcttccttctctcgattcaaatgacagattggtcaagctgcttcgtgaaacggatgtggcaggtgttgctcttcctgcatacgaccgagacctttattatacctcaaagcgtgctaatgattatctgatctttagtgatcgtaagcgtagtcttttgaatgacttcaacgagaataacattatcattccggcttatgaggtaaagtcagatgtcatcaggatgcaagcaactggtcgccacaagagctatgtccgtcatcaatatttcgagggcaagtttgatttccgcagacgtctcccatatcgttatgcaagtatgttcgaggaacaacttcgtgttgaggacgagaatgctcttaaacaaacgatgcaggatctggcttgtgccatttccgcgagtgaaggttgcgacaatgcaaacctgactgaagggtatctgctgttagcaagttcaaatgtcggcgatcctatctctaagagctatcgtcgtttcccattggatgaatttgagttgttcgtgaataaaaccgatcatctgactaagtatattgagtatgaaagcgacagtctcactttccgtcataagacagataagttcatccagttgacagtcagtcttgatctctacgaaatgcttcaatatattcgtgcaggtttcagcccttctgtcaatgaccttcgaggccgattcattgaactacagatttttaagaatctattagaggcaaagacctatacagaaattcttgtaaccaagaacaacagaaagtttactatagttcgcctcgatgacaagaaacatattgttattgaacctcttaacgcataaagaatacgattatgatactgaaattaaagaaaggtaccgttgcattcttgaacaaagaattgctttacgttgacttcaagtcggtaagactggatcgtgttcttactaacttgttcatcaaaatgtatgccgatggacaacctgtccagctagcattcagaaaagaatatactattgacaccttgaaatccaatctcaacacgcttgaggagcaaggtgtaatcaaaggggtgaaggataatcctgatggtgttgaagactggcttcgtagttcacttcttgaattggtaaaccgaggtaatgtcatcaaggagcacgtatcaacactgaaaccactccacctattgagtttccgagtgcagaacagcaagtactgtcgtgattatcgtgcttcagatcagttgtatctgatgttaaagagtaatcctgaagtcatgaagggattggtaaagtatctcagcaaaggttgggataaggcatctggcgaaatcaacacccaggaggatcttgatgttgacacaactggtattctccatattaccaagcccctgcgtgagcgcaagagtatgaacaaggatgttgatgtcattccaaaaccacttctggagaaacaggcagccctgtttaccgatgatgttcgtcgattgctcctctataaagaaaagttgccaagagcagtatttattgactatctgcgaatcctctgcggtcttcatctggctctttatacaatgaaagtcgtgtatctgttgccaaagatggttgatgcaggtactcgtaatgttatagacgactggtcaatggtcgttgatctgacagataatcttgacagtattgtctctcagtatgcttgcaaggatattgagcgcatggagaacagctatggcaagtatattcgtgccacctacatggtcgatattatccagaaaagaaaacgctgtgatgtagatgaagcattccgcattctcaaggaagataacaataagcagggagaatactatgagaaggaactcaatgatattgaggacagccttccaaacagcgatgaaaaggagtttgacaagaacgacttccatgaaatgctggagttcttccccgagaaagactacttcgacatgtttgtgcatgtactcgaaaaatctaatttgggagccagtcagtataagtacattcatgatttcgttgatgccgtctgcatgaagaatagctcttctatgttgttggctgacagccgttcaaagcgtcatcctcgtagaggagctttaggcagcaagttgctcgaaactttagttcagctgttagttcttaaagagagagctaatggaggttatgaaactcgttctctctctattgatgagttagcaagtgccatccgtgagcgttatggactcatcatcaacggaattggagaagagcgttttgcggatgctgacgtagagatgaatgccgcattcagagtaaacatggatgcgttcaaaaataaacttcgtcagattggattctatacagatatgagtgacgcttgtatccttcaaaagattcgaccacgttataaattggaagactaatggaaaatataaaaactctatattacgaacgcttcattcaacatgtagttgaagcgtattcacaaaagttgaagtctgccaagccgggacactgtatgaaaattacaggtctggctatgaaggaacttcgtatcttacttccattgcttcgtcctttaaacagtggaatggaagtttatattctctcagaaacagagaaaggtgacgaatacatccatgcaacaaagcttattgagctacgcaataatccagataaatcggtactgattcttgtaccttcaaacagccgaacatcagcagaagactcttatggtgatgcaacattccagaatctatcggtagctgaattgcaggattcctttgtatataaactcataagtgaattacctgaggagaaggaatatctttggacgcagatgacagacctctttaaggagattaagccagcaagaacaactgtcatcaattatctcctatacctggagacgaagcagtatgccgatgaagcttggggtaacggcttatacctctttggtatgctcccagacaaggatctcattaagaatgaaggtgccatcagaagacgcttcatgatcaatttagagaaagtttcatctgtgatggcagacttctcattgacggcagctgacagaattgttagtctccctttggtaagaaataccgttcagaaggatttgatggtattctttacttccactgacaacatcgaggatgcagtatctctctttgagaacattcatgataatcatcctgagttcaactatgcagtattgccttggatagacaaagacaatgagagcaagcctgtaaaggtcatggttgatatagcttctggcaaggatccaaagaaagaacttgttcgtgatgcagatacgggtgctctgttgcttgccatcccacaagacaagaagggcaaggtgtcattcacgattacaacagacccttctcccaaagacaatcctgacatcttctcatttgagattgcattggtcaacatcgatgactttactgaggtcggtgttgtcaagaaagcaaaggtcggtacaaacaagcgtgcctctcgtaaactttcattgaacatagcgtctggaatgtttgaagatggagaatatatgcttcgtgtccgtgcccttgatgagaacggcattgttcttgacactttaaaggtgttcaaggaagaacgtgttcaggctgcatggcttgatgctaaggaaaagaatcccaaccttcagatggagcaatatcgtctggagcagcatgtggcatactgtaacgaatcagagagcttcacaattaccactgacgaatatacaggagaaggcgaagtcgacaaacgtggtaaggttaatagctatactcaggctattatccattatcgcagtacacacctctcaaaggaagaagatttagaactccctgaaggtggtgcagacagaagtctctggattgaaggaactttgaataatacctatcagtttgattttggtgctgcttatgcttatcagattcagttgcctaagaaactgattcagttggaaaccacattcctcagtaacgatgatgaatttggccatgttgaagcattgctcagcggcaatcctactgacacaaagttgctagatccaacagatacagctaaacaatatcctctgttcgttgcagccaagaatctgaatattcctgatgaattgacagcattgcgtcaggaattgttctctgttatccgtgagtcaacagataatgagacaggtcttacatgtactacagacttcactgctattataggtcttgtcaaaggctatcttgcagaatatgactcttggctgagaaatattcaggagactgaattgagtgaggagcagattatcagtttgcaaaatcttgatacagttcttttgactgtagaaatgccagatggcagcaatgtcaaagtaaaactcattgccccactacatccattacgactggcatggattatcaacttgtacgagctgtatcaggactgggaggagaagacattggagtgtcccaaataccgcaaggcatggtacagaaagctggataaactcttcatgggattgcttcctatggagattgctcctcttgttctcagcgagaactcattgcaggaggcatatcagtatattggagaaatcacattcggttggggcgcatacgcacaaccatcatatggtcgtgaagaagcatttgcatctggctaccgtcagttgaagtcttatactgccatgttgcttaatgttgcccgtgagaagcagattgatagtgatgtgagcaaggaacttgttgttcgtcatctgttcaactatggtttatctcatccatatacagacaaacttgtcatcaacctctttaatgccggtgatgcagctgtatttgctcaggcactcattgaacttgagaagattggacttggtcttgatcttacatacgagatacgcctgttctctgatgacaacatgcttcagtcaggtgaagcattcaaggagttgcttgatcctgaaggctatggaagaactgctgtagaagctgaggtattctcacaagcatccgcaaacagattgttccctaaacttcgtttctcactgaataaggtcagcgattttattgacgaccacgataagtatcaggcacacctttcatttctggttaatccttttgctgtacatacagaattggttcgtcctgacgagttaagccgttctttctacttgaatggaactatctgcagggatgtagtgaatgctgccaaggagggaaagtcattcgtttggaacagatactattcaaataagactctccctaacccagtgtctgagtctgcaaatatggaggtcagtctttttgcacgactgcaagaggcaactggaaagttgctctcttcaacacttgaagagtcagttccagctaccacccttcgtttgaaagaaaatgatatgatgctgttgtcattcattcatgatagtagtgactgggtgattactttcgacaagaacatgggaccagagttctatgaccttccttgtctcggtgaaaatgatgttccttacctgttggattacgttcctggtgaggatgctacaggtgtgtcttcatatctgaccaccaaaccaacaagcgagattggcgcattgatgattcctctcttccatgagtatggtattaaccttgaaagatatgagaacttcaaacagattttggaagatgtccgctctgtaagtagttctttgattatgcaggtcaatgcgacatcacgcaagggatttgaggtcattggaaccactctctgtaaacgcttcttagagaagaaaggtatcactaaggaatcattccttattcctatcgatcttcacaaagaattgttcatcgacttggaaaacgagaacaaagaacgtgctgataaccttgtggttaagattgattctactacaaaagaaatactctttacagtcgtagaaatcaagtgtcgcaatgctcattacaatgcagaagaacttcatgcgaagatggttaatcagattgagaacacaatctttgcactccgttcacactttgagatcgctgctgatggtacagaccgtcttgacagagaactcaaggtactggagttaaagtctttcctggagttctacattcgccgtgcaatgcgttatggtcagcttgatcctgagtttgctcacgattatttagtattcctgagcaagttggcagatggatatacaatcagattcaagcaactgggtgttgtctttgactttactcagatggaacgtcagaagaaacacttctatggtgatgccctcatttattcaatgggtgaacctgtaattggtgaaatcctcaatactgaaggttcgctgaagactgaggtacttgaagctatggataaggaaattatcaatttctttgagcctacttattcagcaccaaaggctcctgatgcagatgttgtaattccagtacaatctgtagctgcgccagataatcctgaacttgatccagagtacgaggtgattattccaaagaagccaacagccaagccagtagtggagaaaccttcaacagaagttccagtcgaaccagttgtaatacctacagttgatcagccttctgtgtcgtttacacctcagccggaaccagaacatacagatgcccctgcacctgatgatccatctaactcttcagctcaacctgctctagaatcagtttctcaaactccagaacccgtcgttgctcctgcaccagaacctgttgtagaaccaatttcggaactagagtctgtagacccaaactatcaagagccatcatgtgatgtgattatcggaaagaatagcgatagtcctcaattcggtattctcggtaagatgaacagtaacggacgtgtcattggtctagacctgaatgaatgcaacaccatcagtttgtttggtgtacaaggtgccggaaagagttatacaatcggttctatcacagaaatggtactccgtcaattctctaaggtaaatctgttaccagcaccaatggccagtgttattttccactacagtgacagcatggattatgctcctgaatttacatcaatggtctatccaaatgatgaagccggtcaattggcaaaactaaaggctgagtatggcgcagaaccaggctgcataaaggatgttgtgttgctcgctcctgaaagtcaggtggaaacaagaaagatggaatatccagatatagacgttcacccaattggtttcgactcatcagagctgtccgtaaaggattggatgttcttgcttggagcgatgggcaacgattctacatacatcaaagagttaaagcagataatgaaagcatgtaggtatgacatgagccttgccaatatccgtaatggtgttgcaaatagcgaccacatgagctcttcgcaacgctctcttgcagagcaaaagcttgattttgcagaagaatacatcagtgatggcaacaaattgcaacagtatctaaaaccggggagacttattattgtcgacttacgcgatgagtttattgagaaagacgaggctcttggtttgtttgttgtaatgctcaacattttctcttctgtaatgaaggttgatggacgtgcattcaataaattcattgtctttgatgaagctcataaatacatgaacaacaaagaacttgtaggctctattactacagctatccgtgagatgcgtcataagggtgtatctatcatgatagcaagtcaggatcctatgagtcttccaacagaaatcattgaattgagttctatcgtagtcatgcatagattcagttcacctgcttgggtgaagcatgtacagaaagctattactccactacagacccttacagcaacagagatggcagctttggggtctggtgaagcatatctgtgggctaacaaggcttcggataaggctattactcaaagaccaataaagattagtattcgtccacgtgttactaagcatggtggtgatacaattcaggcagttaagtaatgaagatattccaatatacaaacaaaggaagtcgagaagagaaccaggatttcgttatccacggttcccttcccgataactcagctgttttcgtcgttgcagatggcatgggtggttattcggatggagctactgcatcaaaagtagtttcagaggctatatatgatttcattgagatgaactatctgcaatacactcctgcagaaattttaaaagaggcgatttcatttgcaaacgatgcgttaatgttgaagcgaatggctatggcagcacagaagatgggatgtgttatcactgtactttttgtcacaggaggcagtgcttatctcacctggcttggcgatagcagaatttatatgtaccgagatggtcaggaagtttatagaactgaagaccattctgtcgttaatgaacttgcaaagatcaagactttgcgagcatcaagttatgagaagtattcctctatcgtgacaaaatccatcatgggcgaagatccggtagatgttgctcctgtcaggaaaatagagattgagcctggggatgttttcgtcctctgttcggatggtttccataaggagatagatatgactaaggcactaagctatgatgactctaagaaggaagaattagatgtcattgccgatactatctcagacaacttttctttcattaaggttgaaatatgatattgaataatgcaattattgaggatctaaaggaaaagtcaggcctcctgtttgacaaagcaggagacttcagcattttatcttccctcatttttgatgaaactggacgtactataggcgtaaccacattaaagcgtttgttctattatatcaaggatgatagaaaggcaagcgaatatacattgaacacaatagccctctatgttgggtataagtcatgggaagagtattctgcatcaaagaatcttgtaagtgattggggatttgacgatgatacactttatattcatgcccttgagttgaacacaaagataacaatccaatatcttaatcgaaagttgacatttgtggttgttgagcatgaaggaaagaattatctgaaggttgtattatgtgaaaacagcagccttcacgttaatgatcttctccttgtttacagaatacgaaaaggcgaaatacttgaagctgagaaagtaatccgaggcgaaagcattggtaattacaagacacatggtgagatattaaatatcaaattgtcaaaaagctaagagtatgataatatcaaaagataacttcgtaacggataacatgaccaatacggtttgttattccagtcttctcccagcagagagcagcggtttggatcctcagttaagagaaaagatgtatgctacattgaaagagtctgttaagaccttgaagcactacgatctgtataacactcgtgacatctggtcaagagattatatgccagtgcagcttacgagagatctctttctgaactacacctatagcccggattatcttagcgaccagaaagcttgtatcacaaactggttgctacacaaagtacatactcgcaaggctgacaagcttaatcttgattttgttacaatccctcttgttcttgatggaggcaatgtgatcaaagctatcgacaagtttggtaagccaacaatcatcatgtgtagcaaagtattgaatgagaacaatctatccaaagaggaacttacagactggtggaaccaattctttgataatcagattcgtcttattctgatcgaatgggaaggaaaagatgaaaatccgattggacatgccgatggaatggttagatatatcacagaaggaaaagttctgattacaaattactgtgatttggacgatgaagaacgtctgagtgagccactgaaagaatactttgatattgaacgtctgcactttggagatgttgaaggaatcaaaggtaccaagatgtggagcctcttgaaatcgaaaagttggggatacattaattttctacaagttggtaaacatattatcgttccaaaattagattgggatgaactcgacaaagcagctgtacaacaaatccagcaagcctttggagcttcttatgaagtagagcttatagattgtgatatgactcaaattctagagaatcccgatgtgaacactaatagtggcggtggtctgaattgtttgacatggactttgttcagcgcaaaataagaatatactcaaaataagaatatggctgtctacacaaatgtataggcagccatatttataattactttgttgcagtattcaatagcttgtcaatattgaaagtgaatgtgtaatcattctgaacgttctcaatcatgattggcatcattacagtcatagttttaccgacaagtgaagatgctccagagttaaaatcttcaggagtcttataaacacatggaataagatagttctctctccaaccaccatattgcccagatacaaaatagacattctctgtaggaagaagaatatcagaaatgcttgcacctttgggaacagtagtagcaggctgagaattatttctatcagtatattttacaccagcgtgcataactcgacccacctgacctttagtatcaacataactgatgtcatcccaattgattttgagagtatgaccagatttgtttttgagggtaaagttgaattgtttagaaccaacaaaccaaacgatgtcaatgtaatcgtcttcataacggtacttactgactccttcttcattaaaagtcacaacctttgtttcaccaaattgttgctttgcatcagcagggctctctacagtactaagtccaacagaatagctggcaacatagcttttgaaagcaccacaagaagttaagcaaagagctccacaaatgagagcaacaaaactaaatctcttcattttcatatgtttatttaaatataaagtttattgtggtgcaaaggtaataactaaacaactaaaatgaatcaaactgcatttacatggactaagatggataataataaacctaattatacttttaaactaagcaagtatttcacatactctagaagtatgaccgggtcaaacaccttgccatcctttttcgttgtcaaatgcagatgagggcctgttgacattcctgaacttcctgatagcccaagcacatctcctgcattgacaaacataccttttgttacccaaaatgaagatagatggcaataactaatagtatagtcacctgtccttaccatcacatacttaccagaacgaaagtcttgtccaactccaataacctcaccaggcaacatggagaacactttttcgtaatgagctgcgagatccacaccgttatgcataattgtcttgtgcatcacgggatgtttacgcatcccataatttgaatttatccgaatgcttttcaatggaagtgaagccttcagataaggaagaatactttgcgatgatgcattagacaacgaatcagacttcaccacagagtccacaggagcaacatctgttgtttcttgtggacttttctttttagggatatgatgtttcttcacatacccaatagtattgaactgggcgtgtgcaaaaggagtactgaatataaaagtcagtatcaaaatcggtaactttgtagctttcatgcagcaaaggtaatcagactcaactaaactatacgaaaagagtaaacacttcccttctccatctaactttatttatgtttatagtatgataattgaagaataatcatacttctttcataactatttataaaacttgaatgataccaatactattcttcaacttcttctgcatatacaatgtaattttgttgacggttggcaatacatacaatatggattgagccaataatcatgttgccaccgaataaaaacgtataaaacagaaaagcaaatgaattacaatttcgatgagaacgagatgccctatgacatccttgaacgtttcggacttacccaggcaatgattgacgatttgcccaccgatgtccttcagaacatccacaacggacgcaagtcacccgttttgccagttcacataacagccgacgatggtgaggaagtcaaggcacgtacaaggttcagccttgtgagaacagccgaaggtggcgttgacgtgcttttctatccacaactcgatgagtttgatttaaaactcttcaacgagcagcaggaaaagaatcttctcgcaggaaagcctattgtcggtcatttggagagcaacgaggttggtaacgaactcggaagcaaatgtttcttccagcttgaccctgaaagcaaacaagttcttagtgttcctacaccagtcatcggcagaaacatccagtatgtagcagaccgctaccatctcactggtgcagaaatgcagaagttgcagaatggtgacatcctcaccatcgtagaggacgatgaggaacagaccattggtatcgacctcaattccaacactggcatccgtttcgcagcaggtaacgaacttgtctggaagcgagaagcaaagcgtgactgggataaattcaacttcggcatcttcggttgttggacaatggacgagaatggcaatctcgattacatcccagaagagaactacaccgaagaaatgtgggacgaacagaagaaactgggtatgcgtatgatgcagcgataacccaaagtattaacccataaaacaagatctcatggcaaatgtgaagtactatccagaagatgtgctcgtggagaaatttcagagcggagaatatggctggcttgattacatcaaccatcactcaccagaatggcaggaagaatacaccgctttctgtaaagaaaggaacctcgtagtcaacgaggaatcggcagaagaatttgtcgattggaaaggtgaacagattgaagctggcgaataaccacacagtaacaaacaacaatcagcattagaatatgtctatcagatcaaatgcattaccagtaggcagagatttggccccagaactacaagctatacttcgcaagaatggtatgcaagcgcatatcatcagacaaggagaaggttatcagttagctgttcaaggccacgattctcctttgcttacatacgccatcacgccacagcaacatagggcattggttgactggggagcaaactcagccaacaagcgagcctacaacacagtggcagaactcgtaaagaacgatttctacatgccacgcgactacgttcatgcccgaaatgccaatggccgtgttgccatgggacttcacggctaccgcataggcgttggtgaatatggaagactaccttggaacagacgttgcgcccacatgatgatggatccgtatcacggaagattcctcggttggactccaagaaaccaggaaggatttcacatgcgaagagttggaggagcaatgttcatgcaaggtgctcctatagtaccagagcgtcctgacggcagaatgaagccaggcgaaatgcagaatggtggctacggcttctattataaaggcggtcagcaaaacatgatacagcaaccttcgcaggatgtgttggcagacttgcaatctgtcattactcccgtggaggttcgtccacgtccaaaggaaccagccaagccatacaacgagcttatcacctccaaggtatatttcagcaatgccaagtggcaggaatgtctgtcttcacacggtatcatcgttaatgttgccaacaagacactgaccattcagtccacagccaccaagcaggattttgtctatgacctcacagaagaggaagtaaagaagctgaccaacaactccataaaggaagttcctgtccagaatcgcattgatatcataaacaatgtcatcaaaaatgattttcaggataagttgacgatggatatgctcaattcaaaagagcaaatcagtttgaaactaaatccagaggtagaggcagaactcaacaatcgccaacagatggtgcaagagcagtctattgcgcttgacggcgaccaaataactatcgagccagaagatcgtagcgtagcccatgttgatggcaacagcctttatgagcagaatgaaaacaagggttggttccgtgaaggcaagcatggcagagaagttcaagttgacgacatcaaggttgagccagtgcgtaatgagcaaggtgaaatccagaaagacgagaaaggcaatgccaagtttcgcatgacagccataatcaacggagaaagcatcagccatgagattactcaaaagcagtacgacaagttcatggccatcgatgactatcaccgcatgaaactcttctcccacatcttcaaggaggtggatatgaaaaacatcccaagagaaggaaagaacatcggtgcgcagattggaggagccctccttgcaggacttgccgtgatgagcgaactgggcagagaccgttctgcaccatccatcttcattgaacaccaccatgaccacaggccacatgtctatttcaagggcagtgtagattcaccgcaagatcttgcttcaagagctttcgacgcaggactcaacgcaggagaacacggtgtaggcttaggtcatggcagataaacaactatatacacataagagagatgatagacgaacagacatttgcagactacagaagccgtataaacatcaaagaagtattggaggacgcaggctacacgttttacaaacgtgatggcttgcgctatcctgcgtatgtaggtttggacaataatggtcagagaattagaggtgacaagttcattgtcatgcccaacaagaactgctgtttccaaccaccacaaatcaagttgtattccgtgacctccttcatttgggaacatccgcaattattcgacgagtacgaatttggaatgaaggagtcagcccttgtgcataaggtttgccagcgtctgctcaatattcaagtcgaacataagaatcggagcatccagaattcaattgctcgtaacaaaccatttgacatcaaggaatataagattgaacgtttcaatcctaaagatttcgagtcacagaagccattctatgcttttttcaagtcaagaggcatagatttcgccacacgctgtgcctttcaagacagctttgtccttgcatcaagaaccaccaaagagggtaactcctataagaatctttccttcccaatgtacattcctgggcaaccagataaatgtgtaggttttgaagaaagaggctatccacacaaggatggttccgcgcgaaaaggcatggctaccggcaccaacgccagtgaaggtgtttggatagcaagtcctaagaacacagccctaaaagaagcccaaagagtatatgtctttgaaagtgcatacgatgccatggcattttatcagctccaaatgcgccaagaatcaggacttgacaaggaaggacggcaagatctgaaagaagccgtttatgtctcaacaggaggtaatccaagctatggtcagatacaaggtcttttgaaagctgcaccacaagcatccttccatctcggtttcgatagagatgctgcaggaagagtgtttgtggcaaacttcatagatatagccaacaaaaggagtatagtggcacctgagaatgtaccgcacgaaatgagagagttcatggaaagcttcgataaactaccgaagacaacaaaggaattgcttgatttcgatgacgataattatgacttgctccccgatgacttacgagaactgtatctaacatttgacagagcaaatgatttggctttggaatatcacgaatctcacttcatctgtaaagaagacaagcaagatgcagtggacaagatgcgtatgacctggaaagatttcaaagaagcatttttggacagactccatctgcaggaaggtcagaacctcgaaactgtgaatattgtccgtgaacttccgtcgcaagactacaaggatttcaacgatgaactgcttgacaagaagcaattctcattgaccgatgttgtagaaacagcgtttgatgagaatggtatggacttgacttttgaacggcaagaagaaaacgaggaaaccaaacatcatggatttaagcgataatagatatgacagacccaatcagaagattcaatatcgtaaccattcgcccacactgggcgcagtatatcatctcgcaaggaatgttattcatcatcagttgcgccatgtttctaattgccggtcacaacagcattacctacaagatgccatttgtggcacttggttccgtaatgatatgcttcatgctctacgaatgcctatatcttcacaaactgaggtacatcatcacctcagaacagctcatcatccaacatggagtattgaacagaaccagtgactacatcgagctataccgagtggtggatttctgtgagaaccgtagtctcatggaacaactcttcggattaaagactgtgggaatattcagtggcgaccgtacaaatccccaacttgatatttatggtgtcaaggaaaagttggacgttgtgaagattatacgtgaacgagtagaatataacaaaaggaggaaaggcatatatgaaatcactaacagataagagaagatggacaatcttttcagccattgctttggcattgatgctgccatcagagagattgcatgcacagatagtttccagcaacccattggaatatgtcgccttggcagaggggaacgaacttatcaatggccagattaagcatcagatagaagaccaacaaaagacggcactcctccagaacaccatcgcagccgagttcacccagatacataaatgggaaaagaagtacaacaactatctgaaaacggcatctggctatgcatccacactgaaagcctgcacctcactatacgatgatggtgtgagaatcttcatcaacctgtgccatttgaagaaagccatattaaataacccacagggcattgtagccactatgaacatgaacaacctctatatcgagaccgccacagagcttgtcacggtatataccacactaaaggatgccatagcaaagggcggtaaagagaacatgctcacaggtgcagaacgaagcaagaccctctgggaactgaacgaccgtctggcacagtttaacaagaagctatcaaggttatgtctcagcataagatactacaccatggccgatgtctggaacaatgtcacggcaggaatgctcgaccgtagcaatgccgagatagcagaacaagcccttggcagatggcgaagatgtgccagagttgtaacaccataagaaagatttatttcaggataacatttatgaaacgtttctatgctctcatactacttctcttttctctcatccttccctttgatgggcaggatgggagttttctccgtgcccaaggcaatgaccctgtattggcaggaatgatacttctctacaccgacaaagccaagaaagagttgaagcagcaggaagagatgatgcttctggagtccactggccatatatggataaaggaagaagtggaagcaaccaccaacctgcataaagagtttaacaactatctggaccaatttaacagcatcatcagctatgcagctcaaatctacggtttctatcacgagatagaccgcctggtagcgcaacttggaacgtatagccatcagctcagtcaccagacaaccaatgctctggcagtagccctatcctccaatcgcaacaaattctaccgtgagcttatcatgagtagtgtggagatagtcaatgacgttaggcaagtatgcctctccaacaccaagatgaccgagaaacaacgtctggaaataatctttggcatacgtccaaaactcaagcagatgaaccaaagactcaaacgattgatacgggcggtgaagtacaccagattgtctgacgtatgggcagaaatagactacggagccagaactgagacagacaagcctaccatcgttcagcgatgcaaggagcgctggcgaaggaatgcaagaccttaaagaaattgtttattccaaaatactaacaataagtacaacaacattttaataaaatacatcaatatgggttggggttcatttttgaaagcaacactccgtcttggaggaaggatgaccagcgcaactgcacacacattgggcggtgcagtgcttcatccacaacagaccttgaaaggcgtaggtactgccaccaaaagcgcagtggttggaggaagcctcggttacattggctgggagaaacttactacagacaaaagcgtagtaggcatagtcagcgatgccgtcataggagaagacacaaccaagaagatcggcgacaccgtatctgggattggcgatggcgtaaaggacttgaaagactctgttacgggactttcagacaacgtaaatggagccatcaacagtgtggattccaaatggagcggtatgtcaggcttcctcagagccatgttctctgggcatggtggagacatgtttggtaacttcttcagcaatatcgggaaaggcaatgtatcagggctaagtctcatcggactgatcgtctcgtccctactcgtcttcggtcgcttcggatggttaggcaagatagctggagccgtactcggaatgatgatgataggcaacaatgccaatctaaccagcgtacttggaggcaataacgaccggatggcgagcaaccataaggaagaaaaaaaacagcaagaagctgagcaaactaacactgtaagcaggaggagataacaagttttattacaaaggattacgcaatgcactatacacaagaaatgatactgcattccgacagtggctattgcatgccatttgaggaaagaaacggagaagtgacaatgtctctgggctacggcaaacagaaacatccgcacacaggagagccatttttccatcatggagttgacttcaaggtcaagaactacctactttcggcagtagctaccggcaaggtgacaggtttgggcaacgatgccattcacggtatctaccagattacccgatacggagactatgaagtgacctatgcccacctgagcaacgtgtttgccaactacggcaaagaggtaaaggcagggcaagtcatcgccgtcagtgccgactccctccatgtagaagtcaaatacaagggtgaagaactcaatccgttggagtttctcaccatggtctatagcaatctgaaagtgatggaacagaacggcaagccaggggctgttcctcagtttgtcacattggacatggatgttcataccatgtacgataaagaccaaaaggagattgaagacctcatgatgcgcttcttccccgactacatgagtgacatgagccaaggcatctatgccctaccagagcatacagaacttgcacttcgcaacaccttcaccatgtcggccatgaagaactacttctatgagactctgccatccatggcaaacccattgggaatgggatcaagaagcattccaatagccgaacgagtacagaacctccttattggagattttctcaattatctcgccttacgccatcaaatctttctgtcgaacatgagtgccatcgaaaaaaaaaagcacaagaccgggcaatagcgacaagcggaatagttgacccactggcagacctcgacatcgacgttcaaagcttcgacataccacgactggtgagcgtctatcccgacaagtctggacacagatggtggacaaaagcatggttcaacaatagtgaaaaaggcgaagcagccattgagatagaacggagtctggccatcaagttcataaacgataacatcgagaaagacgaatggctggaggaatattttcccaaacagatggaggtatatcacaacgccattgagcaaaccagagagcaaattctcaaccaattaaacttgtaaacgaaaagctatggcagaaacagcgcaggataagattttcagaacaaaggtcatacccataatgaacaaggtcaggaatgacctgcaaagtaagcaagccgacgaattacgagcacactctacttcgtttgcaggcttgatggcaggagctgcaggtcccgatggaggtatgacttccattcaggcacataacgacacgctcagatatacaggcaaatggacttccaagaccaccgaagactatattgagatggtcaagaaagagttgaagcgacagcacatcaccgttaatgcagccatggaacagaagatgatcgacaagatgataaaggataagataccaaaatcatccatcgactacattctgaaaaaggcagcaacaagtaccatcttctacttaccgcaggaactggccaagtcaccattggaacgcaagatggacacagaagcagagaaacgttacaatccctcagtttgggagaaaaacgcaggtatagccatcggttccgttgcagacctagcctgtatgggaggatttggcggtggttttaagacagctgccacatgggtaggaagcgacatgcttgtcactcatcttggtgaaaaacttgaagaccgctcagatgttcctctgattatagcaccaggcaaagaagaggaatacagacgagcccagcaagaaaaaaagaaacaatcggaacagaagcctccaatcaagcctcaaaccgttcaagaccctccaccaaaggaagaggctggagaggaaatacaacaatctgaaggcaaagcagaggaaacacaaccagagcaaaccaacatgagcggctggcaagggcttctcacgtctttcggactgaatggtatcagcgacatcggacataaccttggttatgtattggcaatgcttcctgatatgctcgtcggcatgttcactggcaaaaccaagtcaataaacatcaaggacaacatgatgccaatagcaagcatcgttgctggtatgttcgtcaggaatccaatactcaaaatggtgctcataggtatgggaggcatgaatcttctgaataaggcaggacatgaagccttggacaacttcaaggcaaaagatcatccggaacaagctggtggtagagtcaattaccgcatctatccagaagagcctcttaatgcacgcatacagaatccggagataagagccaactgtctgatagcaaccattgacagagtgccttgcactatagcccttcctgaaagagttgtggatgcctaccgacaaggcgcattacctcttagtacccttgccaatgctgtgctggcaaagaatgaccagatgcgacagatagcatccgagaaatacgaggctggcgaacgacagacagtcatcgagagaccacttgcccaaagataacaggattaacaggataacaaataaagatatttatgacagaaaagaatcaacaagaaaagatggctgcagaacatcaagtagagttattcaccaaagcgttcgagaaagccaaagaaaataacggtatatggttggctaacgatggccgcaaggctcctgcactctatcagaagcatttgcaggtatcagccttcaatgccatcgtcttaggaatgcacgctgctcaaaacggctacaagaccaaccaatacacgctcttttcggaagcgaagaaacgtggagagtctgttcaatcaaaagaaaaaggagtaccatttctttggtacaactggaacgaatatgtcaacaaacacaaccctgaggacaaaatcagccgtgccgactaccaggctcttccttcaaacaggcaagcagactacaaaggcatcagaagccgtgaagtaagagccctattcaacatcgagcagacaaccttgcctatggttgacaagaccgcttatgaagtcacagtccaggaacacggcagactaagcgaccgcaatgatgtcgagtctgcctccaccgccattcgccaaggcgtagaaaaccttttggacaaagcacgtgagaacatggtcgaaatacgcagcgactccacaggtgtagcacattacgacaacaagaaagacattatctttctgccaaaagcatcttcatacgaacactatgaggattatgcccgtgatgcagtttctctgcttgtcactgccactggcaatggtcagcgactggctcgtgagggcatggtaataaagaatggcaaagcatcagccgaagattccatcaagcaagaacgtttgattacagaagtagccaccgctgtaaaacttcagaagttgggcatttcagccaaactctcaccagaaagcatggtgatgacagactattgggcaagagaactgaaagagaacccttgtctcattgatatactggagagggatgtcaacaatgccgtcgatatgcttcataaggcagaacatggcgaaaaggttgaattgaacagcaaggctgccagaaatcaggcagatgccatcaagagcatcctacccaagcattactatgtagcagacgaaatcaggaatcttcccaacaagtccacaaaagagtttgtcgtcgtaaaggacgcagatggtaaaatggcagatgttgtacttcccgaaggtgcgtctttaggctttgacagcgacattcctggtatgagaaaagaccgtatcgagcacgctttgcagaaagaaggctatgataccgtcacattctacaatgtagatggttccatgggctaccgaccggatgatagtttctttgacggaaaggcagtatctgtagcccgactcaacaaatggagtctcgaaactatcacactcctcgatgtttcagatgcagtgagacgttcaggagccgtggacttcgacaagatactcatgttgcgtgacgatgatggcaagtgggcactctacttgaaacctgagaacgagagagcattctgcgtatatcccgacaaggcagatgtcaatctgtttctcaccacagtcaagcaaggcgacgaagaagtgtctgacacgatgcgccaagacatggcacagaaatactacatggaagcttccaataagccagaaatgaaggttgacctcttcaagagcaacattcctgccgaagaggttgagaaaatccagcgtgtcaacatcttcaaaaccaaagagacggagaatcagccaagtgtcatcctctgtatgcctacagtgaatggcgagaagcttaaacctcgtgagatttcaccatcccagtggcaacgcatgtggcttgcagagaatatgcaggactacaagaaacaccttgctgccagtctttttgctgatgttctacgtaaagatcgtactaatgcggtagccgtaggcaccgaaaaatcggagcaggaagcccagagcaatgaggtaaagcagaataccgctcagcaagaggaagacaaggccgtggaggaacagaaagaggaaactccagaaaagaaagaacagaaggaagaaaaggcaaaggaagagaaggctaaagccgaggcaaaggcagctgcagcggtcgccataagtccgatgttaaaacaattctatgacctcaaagccaaacatcccaatgcagtattgctcttccgttgtggcgatttctatgaaacctattgtcaagatgccgaaaaagcatcaaagatattaggtattacactaacaaggagttctcgttccaaggatgcggacggcaagcctctggccatggcagggtttccacaccatgctctcgacacctatttgccgaaactcatccgtgaaggtgaacgtgttgccatctgcgatcagttggaatcacccaagcgcaacaaagaggaaatatatctctcaagggaagataagcctctccaagaacagaaaaattcatcaggaatgcacagataacatgtaaccatcatgtcaaaaaatcaagaatatgtagaacaatatgcagagtatgccatggagcagatgcgccgatatggcatacctgcttctgttacacttgcacaaggtatctgtgagagtgcaagcgggcagagcgagttatccagaaaggggaacaaccatttcggcatcaaggcaacttctggttgggttcaaaatggaggcaagtacctcgtatataccgacgaccgtcccaacgagaagttctgtcaatatgcttccgttggtgactcatacgagcaccactcccagtttctaaaaggcaacaagagatatagctcactcttcaagctatctccagatgactacaggggatggactaatggactgcagaactctggctatgcctcaaacaagaagtacgcttcaagtcttcaaagcatcatagagaaaaataacctgcagaagtatgaccagatggtcatgcaggagatgaaagcacaaggcaaaacctttggtactgaaacaaatcctcgtcacaagacagaccagaatgcttctgtaaccgtaccaaatgtttcagatgagctgaaatactcttaccctttgaaacgcaacgagttcatgcttgtcacctcaccattcggtacaagaaaagaccccatcaatccaggtgttacacaaatgcacaaaggtattgatatacgagccaaacatgacgatgttctggcaacggaagacaagggcaaggttacaaaagtcaacaacaacccaaataccgcaggtggactgtctgtcaccatcgagtacaatagaaacgatggcagcaagtaccaatgcacttacatgcacctgagtagtattgcggtcaaggttggtgacaatgttaacgctggtcagcggttgggtgttacaggaaacactggcaccagaaccacaggagagcatctgcattttggagtgaaaagcgtctctacagacggtactgcacgagacattgaccctgctgcttatcttgcagaaatctcacagaaaggcaatatacatttgcagacactacacaatggcaaagacctcactgctcaatacaaagtgagcaatccaaccaccgaaaagccagaagtacaacaaagtccggaagactggatgaagaaactcctttcatctgaagatagtggtgtgagtatgccaagtggcgaccctatcatagaaatggctatgaccatgttctcgtcccttatggttcttgctttgcagatagacaacaagagcgaggaagagaaaatgcagcaagtgactgatgcggttgtaagcaaaacaatcgacctctcgtcgctccttccctcttataaagcttgttccgtgaacattcaagatggcaagccttatctccacgtaaataacggaaccatagagtttacaagggaactcaccaatgcagaattggcaaagcttcagcagacgcttggcagtgccagtctgaatgatgatgacaagcgaagaggtgttgcttctatcatacaaacagctgtggtttcgcagcagatgtcccagaactatcaaaaagcaatggactatcagcaagacagacaagaatccgttcaaatcaaataaagaagtaaaacaataaatgcgtttattatgatcaaatgtaatgtaactgtatgtggtacaatatctcgccaggcgcagatgcgtgccaacaaagaaggcaagcagtttatctcttttggaatcagcgtagtggttcaagccaagaccggtattaacaagactgtagaaatcagtgtggccaaggatggtgataatcaagcagaactggttaactatcctataggttctcgtgtcgaggtggcaggaattctgcaattccacaagaagggagatgtgctttacctcaatctctcggcttcgggagtaaacagcttcaatgcaggaaaccaagatgccattactggtagtatcgagtttcgaggaaccatcggcaagcaggttgaagtaaaaactgacaagaagggcaagtcatacaccatgttctctgcatatagtagcgaaaaagacggagaaaactattcctatacttgggttcgttttatgcaattcgacacacaaaaggcagactgggtacaggctaaggctggtatcaatgctaagggtgatttgcaggttggagcctacaacgaccgcctcgaccttacttgccgtatcactgagcttactccatgggagaaaaaatctgcatccaccaaccaataatgaatgattatggctgattacaagaagtataatactgacggccgtagcagtgaagatcgggctttggacaagtttgccgagatgatgatcttatgttgagttcaacataagatcattaatgtctgacatagaattatgttgggcattagtctaaacaattaataatcaatcgttctttgacattttgcacaacataattctatctttggagggattagagactatctaagaaggtcattaactccttatcctctgaccattttcgtgatggtgcatcagaaacggactgctcacattttttgagagcttctaatttcctctccatgctaatttcggcgtagatgttagttgtatcaatcgagctatgtcccatccaatttctaaccatatcaatatccgttccagaattaagtagatgagtggcggttgtatggcgtataacatgaggagatgggcgttttttagcaagagatggatgatttaagattacatcttgtgagtatttctttatcatttcataaatacagaatcgactcataggctgattgaatcggttaagaaaaaggtaatcgtcaggcaacttgttgtctataaatggcttgagtaaatcccagaaatcctcccatagaggacaatttctctctttacgccccttgccatgtaatgtcaccattggcattccacgttttgaaggcatcgcaacatccttcactttaacaccaataacttcagacactcgggcgccagtattatacatgaataagataatgacatgatcccgatttcttatcccttgatatttacatgttttcaatggtgcagcagccaaggcttcgatttcagatttgtccatataggttatcatgcgtttttctgttttctttgaagggataagattgacattgtgacaccaatctatatgttcaggagatttccacgccagaaactttgcgaaagcctttattgcagctaaacgattatttcttgaagaaacggtaatttttctctcaaattccagataatcaagaaattttgtaataacgtcagtcgtaatatccgagattttgagattatctattgcaatacttgttaatgtcgagacatacgataccaacatgcggaatgtatcacgataactcatctgagtgttacgactaaggttgcgagtgacaattaagtactctacgaggaatggtcttagccaatagccaagatgttctgtttcagcaatttttctatttttcattattcgtgtttttataagcataaaacaatttgtttgcttcctgcaataaagttggcgtctttgttagatagacggaagtgaaggacacgttaagatgccccaaataggtagacaacttcggcagtaaatcctgtacgttctttcctgatttataccagttagtaaggacgttgaccgcaaaagtatggcgaagatcatggattctaggctgatggcgtcctctatcagggaaataaagacctgcattcttacgaatggttgcaaatatctgatgtagagataccaaattaactggttttcctttcagatttatgaaaacgtatgactcctcttccattgggtacatttgagtccttcgccattgtaatatatcttgtatcaatcttgagacttgttcgttgaaagttaccaagcgtgacttgtagaacttactacaatgtatatgcacgtacatattatccatatcaatatcctcaatttttaaggataaggtctcacttattctgagtccaagcacatacgtgatcatcaagatatatcgtatacatattggctcattaacaagtggtctatatttgcgatatgtaagcgcacaatcaaatagtctcttcagttcgtcatccgtatatatgtaagcgggataatactctggagctttaggtagaaaaacgggaataggtatgttttgaatgagtcctctggaaaaagcccactcgaaaagtttcttcagaatgcagtgctgagaatgccaatatctggtgatgacatttccttttctgtaaaggaaggcattactatcactttccgttattgaagttaattctgttgtttctccaatgaacttagcaaatagtctcaaagagtaggttgtactctgatccttgcgaccaatagacgtacgaaacttgataaatgactcaacggtttcttttatactcatagaaactccccccagtttatatttgaaacatctctaagtgaattgagatccacttttgcatatactcttgtcgcttccatacttttgtgacctagtaaatcaccgacttcctttaaggtttgtcctttgtttatcaagaaagttgcatggctgtggcgtaaacaatggggtcccttgtgcctaacttccatttcactggatttcaaatacctatatacgacggaagctatggctgtacaagatataggacgtattggggctggtgtacaaaagaacaagttgtcgcttcctatgtcatttggccttccctgttttaggtaagcgataatagcttctcctacattatgtagaagtggtaatacttgtggtcgacaattctttgcatgcttaatataaatttgttctttacgccaattgatgtcgctaaccttcaagttcgcaacctcactacaacgtaaaccgtacatcgcaagtaacataaaaatagcatagtcgcgcgatgcggatttacctgtttgttcttttacggtttgtaacagtttttgaactttatcccacggcaagaaagaagggagattttcttcactgtatactttgggagtgattaaagctttgtctaggtcggcaacacaccaccccttttcgactgcataacgtagatatacacggacacaacacaggtactctttcagtgtattacgttgaaccttgttaaccgtgtagtattcaatgtatttatctatatcttccattgttaaagggtatgcctggttctccttttctattatcttgtaaaaataagtgagtatatctttccttcccttgatataggcatgagaatatctcctgtatgctaagtgattaaggtattcatttatgcgcattcctgatattgaaggagattctgattctggtagcatatgtagctctttaagccacatatttgcaaaataggtgaagaaactgtaattagacttggtaccttttttcttgtgagaacctttgtcttccaggttttgccatttttttgctgcatttgagatttcctcattggtaacagtacggaagttctctaaattaagatactctattagatgaagttggtactgtgcataaagctgaagtgtctttcttttaaaaccttttgatttgcaatccatcaagaaagacattctctcattataaaagggagcagcaatcagtctgactttgtgccatttgcgttctgcgagataattgaccatttcatcttgataacgaaaatctaaaaggcctacgtattgtaagaaatcaaccgccatctcaataaatttgattcgcgaggaagggcaatcatgatgtttccgagaatgataatgaccagaaatgggtgaagaccatagacgtgctgcttcaacgacatcatcaagagatacaattctcttttttccatcatgaagatcgaaatattggataaacttgagcgaatacccagcccaacccaatagtgttagccgggacaacccttccttacttttcatagtcagaaaggattctcgctcctttaataatggtgcagccaaatgttttttaaggaatggcttgcggataataatttgttctaacatgctcttataattatgtgagtaatacaatataatataacgagcatctataattatgttgtgcaaaactcgacaagaactctaattatcaagtaaatatgaaagaaactgacataaataaatgggtaacattaatgattgagaagatcaacaccttgcagaacgattggaagaagccttggttcaccgaaggctccttatcatggccgaagaacctgtcaggacgtgaatacaatggtatgaacgccctgatgctcatgatgcactgtgagaagcagggatataaattgccagtgttctgcacctttgacagagtagcaggtttgaacttcatcaagaacaaacaaggcagtaagcagcaggtcaaggacaacaatggcgaggctcttccgcaagtaacaatccttaaaggagagaagagtttcccagtcttcatcacaacctttaccgtcgttgacaaagagacgaaggagcgtatcaaatacgatgactacaagcagatgacagaggaacaacgtaggaattataacgtatatccaaaattgcaggtttacaacgtattcaatgtcgcacaaaccaatctgcaagaggctcgccccgaactctataagaaactggaggaagcagcagggctgaagcgtcctatgcaacatggagatgacttctcattccctgccatggataagatgatcaaggaaaacggatggatttgtcctattaagcctgtctatggcgataatgcttattatagcatttcgaagaaagagattgtcattcctgagaaacgtcagttcaaggatggagagtcgttctacaccaatctggggcatgaaatggctcattctacgggcgcagaggaccagctggcaagactaaaacctgcatcattcggaagtgcagaatatgctcgtgaggaactcgtagcggaacttagtgcagctttggttgcccagcgttacggcatgaccaagcatttgaaagaagacagtgccagttacctcaaaagttggttggatagtttgaaggagtcaccggagttcatcaaaactacacttacagatgtaaagaaggcttcacacatgatcactcaacgtattgatgccatgcaactgaaaatagaccaggagcaaagtcaagaggctgagcagaaacaagagaaagctccaacgatgtattacgcttcagtggtgtatctccagactacagatgctacagaccgtctcgacaagttcaaaaatgatggcgattacaatacactcctcaccgaggcaaaggaatatgaccagggtgatgctcctgatttgtccaaaatcaatctctcacccacaaaataccgtggcgatgaccttcttatagaggatgaccattatgctgtagtatataattcaacagttggaggcacatacgatgtgatgcgcaaggtaagcgcagaggaaatcaaggctaacatcatccgctacggcctcccagaggatgctacagacgacgtgaaggaagtagccaaacaaatggataatgaagaggttgttgctcaggaagaagagctacactaccatcgaggtcgataattcattctattctattaaagacagtcactatgttggctgtcttttttgttttatatgtaagcattcagcaaaccccgtcttgcaaggtctataaacataaagagatgcctcttaaaaattccgacttttctcttaaaaagtccctatttttacgagacatctcttagtttttacgagattcttaaatgataccttgtttctttaaagagtgtggcaacagatttaccagatccttggagtagtcactgtcatattcatggacatggttcagaaaataattcatccactgcttgaagtccacgtctgctgccttgcagcatcccatcagggagtagatgacggcagcatcttcagcagcgtcgtgattgccgcagaagagataattcttgcgtccgacagctacgggtcgcacactgttctctatcaggttcgtgtctgggagataccttccgtccatcgtatacctcaccaaccggcgagagttgttcaggaagtagccgatggcttttcctatgggactcttcggaagcacatttccctgctcacagatacaccacttctcaaaagcgcgtatgatgggataggcaagccgcttcctcagctccatgcgctggagggtatccatatgctggtcgtctgccatgctctccacatcatacagcatgccaatctgggccaaagcgtattccgccctcgccttgtcatgggttaaagccctgtcaaagtaccttcgggtatgtacccagcatcccaatgtcgttatgccttcctgtttttccaggatgttgtatccggcatagccgtctgtctgtatggctccctgataatccttgaagagctgcaggaccaccttggctccccgggaaccttcattataggcgaagaacaccagactgttgaccatgctccgtaccagccacaggtaaccttttaccgtccggtgcttctcgttgtcgatgatgggaaccgtcgtttcatcggactggatgtaatcggtggacaggacgagttccctcaaccggtagtaggctggccgcatcaggtcggccacatcgtggaaccagacttcgatcgtggaagggggtatgctgactcccaaccgtttgaacatctgtacctgacggtagaaagggagatggtccacatacttcccgaccatcaggtcggtcagcagcgatgcactggcatagctcttggcaatgggttcattctgtacgggcgctgtaacgatttccttcgtctccttgcgcatgcctttatgccggatggtcacccggacgtacagttcggcaggctggagttccaggtgttcggacgtttcggcatcctcgaacaggatccattcgtcttcatgccccagatagccgtcaggatagatgtgctcttccacgcggcggaggttgtccggcagtttctgacggaccggaacccgtttttcatgttccttgaccgtcaccttcctgtattcattcacctcctcgacagccttgcggaccgtctcttcctcttccggggtcatttccagcaggtcaaagtccagtttgagctggttggggtcatcggggatacgccgcttctcggacatggcaccccacatcttgcgctccagataaagaagtttctgttcaagttgtgctatccggctttccttggactccaaagcccggtcgcgctcctggatggccttctccttttcagccagtctggcttcgtagtcggcctgcatccttttgacgtccgagaattccttcagctgccgttccgctttcaccgcccgccggaactcggcatcacggtcgctgagcagctgctcgatgagggctttctggttggaggtttctgacatggttttctgttcttttcttacactgcaaagatacgaaaatcagaccattttacctcattttcagaccataaaaaacgacttggaacactactttttcttgggctcccatcgactgcaccgatgaacttccgaaggggatatcccttgtacgatcatcatcaggtcagcccattttataccctttgaagtggcagggtcatcggtgtcaatatcggggagtttgaaggctccccgttcaagtttcatgttgtagataaccagaccaccgtactcggcatggagaatcttcaacccggtcaatgatttgttgataaagatataggcatcaccgtcctgaacgttcatgcccatgaggttggtcacaatgccgctcagcgaatagaagcttttgcgcatgtccgtaggatacgggtacaggaaaaatcggtttgaatcattgaggttgaacatgggctaccgacataagaggattaacgaacggagcgcttccagagacaattcactctggatgcgcaagacgacaccattgggatagaccacttcacagggtacatgatccgttgcttctttagcggagccggtgacagacatgcccagcttgccgttttggtcaaacatgttcaccggaacaaaaccgcccgcctgcggcagcatggcttctgtaagtttcttacgccaataataaaacttgctttcttcaaagccggtgttgtgacaatagtcacgaatggaaagtcccgttgacttccattcttcatgaatctttttaaattcttctaatgtcaagttcttcattgtttcacgttttaaattcacgcaaaactaagaagaactttcagagggggaaatacggggtttgctgaatgcttacatagaaacgtacttgtggtaaaaaaatgacattcccaaatgacaagatactcaccatagagttgagtgaacaacagattagtggcagaactatcagccttagtgtggaatatgaggatgtgcttaacgcggactctttcaacaaggcgttgttatatgaatattaaaggttaacggtatgagcatcattcataatttgatggttttatcattattgcttttgaagatacattatctatgttatctgattgtttcaccatcatacgtcttgaaccaggcgcagaactgcttgatgcctgttctgaaattcacgaaacatatttctccataatctctattaaacttactcatatttgcatgggtgatgctcacgtcagctataggaagaggttcctctgaaaatattgccttgcagtttgtttcttcttgtatgaaattagccaattctttaacggtgtgaggagatgaactacctatattatatatttcaaactgtcgttttctttctaaatgtataatggcacttattgcgttgacaacatcatctatgtaggtaaagtctcgtttgcataatccgccgctatataaaactacaggttctttttggagcatagcttttgcaaaaatccatggtgccatgtctggtcttccccattttccatagacagaaaagaatcttaaacctgtaattttcatgtcagttgaatttgaaactacataggcttctagctcattttgtctcttagtcattgcatagatgctcttaggagtatcgtccaccatatcttctgatattccatctttcggaatgatatgattaccataaacactactggaacttgcaaacacgaaatgtttgacgtgacatttagcagccaaatgaatgacatgcgaaaatgctacaatattgtttcggatgtagcgttcagggtgttctatagaatctcttacacctggggatgctgctaggtgaataacagtatgtacagatttaaaccaaggagtcaataatgtacaatctaaagataagtcatgttttaagaaaacaaatgaatcgaatttcatcaacatacttaaacgttgatcttgcaaaacattttgtttttttcccccagtcaggttatctatcccaataacagtaactccttgttttaataaacaaagagtaagggaaaagccgataaaaccagcaacacctgtcacaatgattacatttgtattttctttgatttcaaaatccatgaattttgcatttctaatagtttgcctcctaatattgttaaaaactcgtctgagaaagacgttattctaccagctcctggcaagaatgtcatttcgctaaagtagaccttgttatgaaattcgtaaagatcaattctacagaatggtagtgtcttgcccaactgatgtactacatggcgcatcttttccagcgttgtcggaacaggaatgtccaatgagccttcatgtctattgatgaagccaatttgtttctcccatatgttcgtatcatagataacgctacgctgagttttatatgaattgctatcatatacaacctggcaataatcagcctttccataaaaagcaaagaacttataacaaattacagaacttgaatagtctttatcaggtgccagatattcttctgcaaacacgcatggtgatattcctttatagtgaggttcagctgttgtgattccgaactgtgtattcaattttttcttatagaagcgcttaataaactccatatctagtgaccatttgtctcttaccacaatacaagagccattgtcatgattacattttaagacgaactgctctgggagcgtgtcaaagtctattgcagatacagttttccattctgcatatttttgacacagtatatcctctagatttagtttcgctatataatcacggactgcaatcttgtcagcaagcattgtccaacttgatgtatcggactctgttaaaagtctaaaaagcatcttgttgaagttagaacaattctcttctgttatgtcgattccaaatttttctttgtacagtattttagcaagacggacaggtgcaatatgaccaagtatactgtttctgacaaatctccagccatctttaaatgccttaatatgtgggaaatataaatcctgttgaataccagcatttataaagttcatccttgcctgttcataattgcgtgacagcataaactcagcatccaaacctacacctactacatatccgcattccatagtacttctccaatcctgtaagtaattagatagcataggggtatcaataccataagctttgactgtttttaagaagttcttttctgacaatctactaacaggcatattctttttagaacaaaagtgcagcaccttagcgttggcaaggtataaagcgccgaatcttatctggcaattccaacttccattcagctcttcaattttcacacaacatggatctaagttactttttgagagtgctggttcatctataaaaattccctttgatacagacagtaggtaatttgagtgccattgcttataaaacacatgagcagcttcagagtcctttgcatacataactcctccgttgaagtattgtgttatcttatcatgttcatattgtagacctgcattctgtttcaagaaatagtctctcatcggatgatgtttgaacaagcaatgcccatctaagacggcagcaatatcagctgattcctgatcaatttctgccaaagactgtattaccatggtatcacaatccaagtataagaaatcaccaaagacaatttctcgtaatctagtcttcattagtcttgagcgttcaactttcgacacagaaggttcgaagttctctacgatcgtcttattgacaatcgaaaatatctgttgtcgtagcccgtttaaggtagcatacgttctgtcgtcacatactatatatatagtagaattaggcatgtgatgacgagccgacatgactgagattaaacactgttcccaaaacaggtcgttttcgtcactagacaaaacatatactattttcgtattcatttcctccattctgataatcgtccactcgttgagcaaatccaattgtgttcatctgaattccaaaaaccttcaaagacacttgtattcattgtttcaacatttctgtcgaatacatcaaattcttctttggataggctatgcaaattctgtctatattttcttaatacacgctcataatattcgccaaggaactcacaaagaggttttggcatttgaactgtagtcatgaactcaatagaatccacacagaacttaatagtatctgaatatttcttgccattttgtttgccacgcatatccgaatttggagtttgaacatagatgtatcctacaacaggcatatacacgaagctcttggcataataaatacatttcaaggtatgtaccacgtcctcccaatatacgtgctcctcataaaagagattattctgaattaggaagtctttcctgaaccatttagaccatgtcgctcttattctgttttcgtaatgaactgatgcttcataggtaagatattccaaaccagacattggacctacagttttttcgaaccatgcttcaccatgtttgttaccatccaagctctcagctagcgcattaaattgaaatacgtccaattccgtttcccaaactgcattgaaaacaacatctaggatgttctcttccaaataatcatcaacgtctacaaaccacaaatatttaccttgtgcagcatgaataccggtgtttcgtgcagctccttgttgtttattagattcgtgtcgaattatttgcatgttgcttatatcatgcgattgcttatactttgttgctacagcataagtgttatccttggaacagtcatcgacaacgataatttcaaatagcttaccattacatttctgataagccttttgacggactatggaatctatgcaatgctctaaatactgctcagcattgaatgcaggaataacaattgataagaatatctccatcgtactacatacttaagattttacgaatagcagtatcatttcctggtatgaatgtcctttgggcacatgaagtatccaccagttttttacacaaagcaacaaactctaccaaatcaatgttagttggaattgcctttatattatcagaatttatagccttcaaattctgagtttgttctttgcgtcgataatcatctccagtaatgacagaaatggctggtataccaagaaaagccaattcacttaacgtgtttcgaccggaacgtgttataattaaacatgcatcgttgtaatagtcagaggcattaagaacatgtgaatgcagcacaacattattaggggtgtagttttcgtttatggcatcataaatatttgaacttgaacatataatatgcatggtgtaatcaggcatcaaaacagcagcctgctggcataactcagccaaggcaatagtagacgctgcaaattgatgtccaacatttacagttcctcctcccaaaacacaatatatatttttggaggttttatgataaacactcataatctctggccttaatatagtatttgtagaaacaaaatctctataagtgccgttgtctgtaatttttcgaagaccatgaactatagccaaatcagcacaagcatacaacgtattgaaatagtccatagactctttgtcattctcgtcatttcgaacatctgcaggatttaacaaaaccgcaattttaatatttggatgcgagattcttaatgagtgagtaagcaaaggttcaccatcaataagcacaacgtttgggttaaatgtccttatagcttggtgaatatattgtcccattttgtttgttggcaacaaaccgattgagcaataatccattggaattgcttctctaatgtcttcaaatccgtgagactccaaatatctgttaccctgcagataactaatacattttatttcacaatcatatttatcacgtaaagtctccaacagagctacacctgaaacaacgcgtccaagcccagggaagcctctaaatattccaagtattttcatgagagttgaattatctgattaatttctgatatgtagtacctatgaatggataaagagtccacaggaagatatacacctccttgtcttaacaagaaagcatactggtaatattcacttacttttccgagtatatactcgctataatctccatatggatatgcatatgatttaatcggtccaaaaataatttctaatcttctctttgattcctcaagttcgaacacgatttcatcatcattcagtctaagcaatgagcgatgagtgacgccatgagaaccaatttcccaaccattttgttgaagttccagaagaccatccacatcaaggtgcattcttatttttttatctttgaaattccatttgtttgtgtcacccatatagtcagagcatacgaacactgttgctgaaaagccataacgattcattattggcaacgcattatcaagcaatccgacatatccatcatcaaaagtacagactatacaattttttcttttgtaagctggcctattcatataatcattcatagaacaaagtatgtatcctctactatgtacttgctctacaaaactttcaaatacagatattggagttgttatattgtcatggctaactccgtcaacatcatgcagtgagagagaaatgatgccgtcaggcttcgttacagctacatgattatcgttattaagctgagattcccacaaatgtttaatcacctcttctgttgttgatgtgaagaaagcagaatagaagctttcatacttatccaacgagtcctcgtcagtaatcatgttgtatagctgagctgccatcttagacggttcatagctggagaatatcatttcaggataaagtttgttggccatttctgccacataaccagtatttgtcaaaagaaccggtattccaagagacatgctatctatcacagaattacccattccttcacaaattgaaccctggatataatagtcccacctacactgtactcttttgaaatcttctctctccatgcaccccgtgaaggatactatatctgaaatctgcatttcatctgcaagattttgatattgttccagaacgtcatcatcaatctgtcctacacattccaaagtaatatctcgattatatgttcgtgcataagatgcaaccattctcatcagaagactgattcctttcttctcattcagatggaatgctccacatccaatatgaatgttattcttattgggggcctttatttgctttgagatacgttctgtataattaggaatgacaacaatgtctgttttattaggcgcgacaagttttatgttatcagctatttcttgtgacaaagcaaacaccttctcgcacttctccaaggcatatttgttgtagtggaaattttcaaaattccacttacataggtttgcatcagaccctcgaaacatcagccaatacccgcatctgcttttttgcgcaagaagcgcggtaaaatagccattgtatcctcctccgaaacctatcagcaagtttccttcaggtattgtttctaaacatctctttaacaaagattcctttactaaatcaaatccgagatggttattgtaaccaccgtggataacatctgtttcacatatacttgaacgacaaactttaacactatgtcccatactttgaagcaagcattctagttggtgacaactatatgaaaggccaccacctgaacctgttgaatattcgttagttattatagttatattcattgcttctttcttatgatatataatcgttttgttcgtttattttgaggatagcgatatgtctcccatgaaccaatgtccgcattggggaacaaacgttcaatatcctttgagtcaagtcgtatttgacaagggaaattctcgtcctctatagtataggatgaatcgataacttccaatataaatagagcaggagttcctgcaatgtcgtaaaagccttgcagcttgcgcaaatactcttctttagtctttacaccatcgtcatatgcgcaattcactaaaacgagtatgtctgaaacaataggcgattgaggaaactctgcggacactataatatcattccgagaaaacaaagtggctattttttcttttgcaacctcggccatgtcagtatccctttcaaaagcctttatatttttgaaacccaaatgacaaaagatgcttgttacatcaccttggccacaacctatttctacaactctttgctctctgttttcgtaacgtaaaatctcaaacactttctgccaatatataggaaaggttggctcacagaactgtttgctccatgaacgttgatacttttccttgatattgtaggagttgtaattgactaacaactcgtgaagttcttccatatatcgttaagctggtttataatctgttcactatctttttggatatctatcgggtaagtttcatccttcatgatgcacggctgagccacaaggtctggatgaattcttatctcactaaagtttttgcaagtatcaatatccttgtaaaagcaaggggaatcaatatacagtatagtggtttccttgtccccattcttgatacgccatctgatagcaccagtccctttgtttttcttctctatacaatacttttctaataatgggaacacgaattctttatatgtacagctgtcttcacctccaatctgaggaagcagttttaaaggaagttcatgttgcaaagcgaaatcaatcatgtcttcaacgtccgtcttgttgaaagttgtttgtatgactgtattaagcccaatgtcaattccagccgaatgcacttgcgaaactttattaacaatagtatccaagcacccattaccagtacttcttccaaaggatattggatttacataagggaattgaatgttaaatttcacacgtgtgttgcttaactgcttaatctgttctggagaaatcagggaaagattcgttgcgcagctgatgtcagaatcaagatgctgatcagcatacataatcatgtcaacaagtcttttgtgaaggaaaggttcaccgccactaatgttaagttcttcgatcttctgtgtagacaacacatcaataatgcggcaaaagtcttcataccttattactttggcttttgatgtttttgcctgcccctcgttatggcaaaacggacatctataattgcatccatctgtcactaggactctgattttattccacaataaagtctccatattatgcaagaattattttagcattataatatagctccagttcatgaattttttcgcctaacagatcacaaccgtcagcattatacatctcgtttggcagaatcatcacatcatttttttctggattaaactgctcgcgaatatctttgtgattgagcaagcctgaaacagaaacggatccaccatacaaatggttttctatcaagtttgttttcacgtttggtacatccttgaaagcatttgtaaagtaatcataacccgataatggacagatgagatttacgaatgtgccttcgggaaggctcttgataatctccttttgtttctcaattcgctcatcagcatctataaaatattcattgttcccacccctgaacacatctttaagaataggcacagtaaatattacatcgggatagttattcttgacccaagttatacactcttcgtatgtatcaatacaggcttgagacaacttcttcaatctaggttgagacgttgctgtatgttccattctacgaacaagaatctgtctgactttcttgtttactcctagtctataaagcagttcaaggtctctcttaatgtcatcaagatttcctgtaaacatcaaagtgcacttattcaatggcgcatgctcaagtaaatacatagttctctcacgtgcagaacgtggaataattgcctcacgttgttcttgcatagtgatgagagacaggtctataccataattgggtattgatttcagaaaatcaattttatcttcttttatatatgccccagtagttacagtggttattttcttggtgggaaaatagtctgctgcaattttgatgaagtcatagatgtctggatgcaaaaaagggtctgtgtggggggcgacaagtacacctgcacccaatctaacatagtttacatttgggttgatatactcaaatccttttaccaagtcttctttgtcaatagctggtattttgggataatgacccaaatacgaatctgtatgaactttacaaaaaacacaaccaatgccacagtacttacttaaaatggggatattaccgaacgtagctatttccattctgaatgcatcgaattgttctctatttagtaccataaatgtattttatttcttatttatattctgaatccagctaacgtcaggctctttgaattgcagactgttctgtgcaataatatctttccatgagttcccgatataagaccatcgattatagtctggattctcttgcgtcatactcttgtaagtattgatggcagaaacacaaatttcacacacatcgtgattaaaggtcccatcaaagaaatctgatagattagttggtagatgatgcatgaaccttctgtggttgttcatcgacacatacattgcagggaaacatgctgcagtatatgcaaatccaaaaacggagtaatggattccgcacacttccacgcgattgcatatagtggccttttcattaaaatcccttggacatatagtaatgtttcgatgctttatattctttatctttaagacttcttctgctgttaatacattgcctttctcatgaatcgcatctccaatgcatacaggagaataaaccacataaggcttagccgtaattgacggctgtattgtaccgttagatacgatgttgatctgttctatatagccaatatttttgagttcctcaaatgcacgaaccgcataatctataatgtcagacaacaaaggttcacctccaagaatacggatcattttgaccaggccagattggtgttgtttaatctcctgacatagaaaatctatatgtaccttttccatgtcaatatgtgagcgtgttaccccatatagcttttctgcattgcaaagtcgattgcaatgtctgcatgcgaggttacaccgatgtgtgatatcaacttctactatgattcctttgagttctgacttcatcttagtgcaggtggtgtgtaattgatatattgctggagaccttcaatggttaaaggcgttttctttattttttgatagttaggacagtggtagcacggcaagtcggcagtgcaaggctctccctcgaaaagcacgcttactagatgcttatagttatcactgttttcccattcaagtatggattggtcatttatgttgccaaatactccccatttattgacactacaccccaagattttaccgtcccaattaatttgtggacttgtaaagcaatggtagcagggtgctttatattccttatgatggacttttttaaattcttccctgtcagcaactcctaagccgctttctgcacgaacgaaatctttatctcttactggtgagaattgggaatagttcagtttaggattaaatttgagccccaactcctcacaaagtttttttaccaatggaatctcatgctcgttatgtccaaatattataaattgccatgatagataaggcctctgagagttgtatttctgtttataatagttaaggcgctttatgtttgccaacaccttgttaaagtttcctctaactctgtattgctcatatgtttcttgcgatgcaccatcgatagagagatttagaaattctacttggtacttaacaagtgcctctaatacactatcatctacatcattgaagtttgcaccattaccgcagtatagagtcacgcctttttcataggcacattttatgatttcgcctatttccttgtttaagaagatttcgccccagtttgacatctcaattctcttaatctgaggattctgagaaataaatttcacgaactgtggtaaactgaattgtccctttccaacgataccacggtgggtaatacctttggacgtagagcattctacacatcgtaattgacatatggttgacatatcaattgatgcttcggttattgtaggaagttctatcattgttcttaaaatattctattgtttttaccaatccatcaaccaggcttgtttgaggatgccaatcaagtaattgttccgccaaagttatatcaggcttacgcttcttggggtcatctacaagagcatcgctatattgaatagctgatttggacttaagcaggtctattatcagctgtgcaagatcacgtatggagcattcttcatttggattgccgatatttattggtcgaccgatgatttcgtcggagttcagcatagcaacaagtcctttgatagtatcatctatatattggaaacttcttgtttgcgaaccttttccataaatgataatattctttccagaaagggctctgttaataaactctggaattgcccgtccatctccacacgccatattggggccataggtgttgaaaatcctcacaatcttcaccttaaccccatattttctaaaatagtccatacataggcattctgctgcacgtttaccttcatcatagcaagctcttggtcccgtgcaagatacgttgcccgaataagattcgggtagtatatcaagtgctggatcaccgtatatttcacttgtagaagcctgaagcataggaacgtcaagcttccttgccaattctagaagattacgagtcccgactacggaggtcatcaacgtatctataggctctttgtaatatgcttttggcgaagcaacacatgccatattgataattaaatcaattggcacaagatgagcggtgtcatgtccatcctttatatcgaattgaatgaaattaaaatgcgagttatcttttagttctttgatattttcgagactaccagtgcttagattatctatacatgtaactttacaaccactattaactaaaaccttacaaaggtttgagccaataaagccagcgccgccagccactaagatatgcctaaattttatattccttatcatagcaaatgatagtcttctagtaatctaatgtgctcttcggataaattgaatccagtttcacctacagcaatgtttctgttatatttggcccattcctcgttacttgttggttctttccaaccagatgcaagaagctcgtcgaagaattctgttcctggatatggattatagcatttcggtccatcaattttgatgttgtcgtattcatataattcttttaccaaagacagagtcagttccaaatcctctggagattctccaggcaaaagcatcataaatgacaaatcaacatgtatgcccatttgctgacacatttgcattttctctataacttttgcccttgttattcctttgtgcatttttcgcagcattttgtcagaaccagattcaatgccgatatagagtttggccacgtttgaagataaggctctttctataagagcttcgtctacacgcatcaaatccagctccacagatgtcggcattttgtatttttcaataatactccacgcccttgtagggtcaacgaaaatgttgtcatcataaaacatccagcccgtgacaccgtaattgtcaataaggtaatccatctccttataaacattatgcaatggatatcctctccattttgaacgattcacaacagtgttataacaaaaagcgcatctttttacacagcctttactcgtcatgaatggaagaatcttgcctggtatataattctttctcttctgtataggtttgtccaaatacttgttcatgtccaataaatcaaagggatgataacccaatgtatcaggcatggttacagcaggtataggagaaatacgaatttctccattatcaatgtaacaaagcccaggaacagcatctgcacttatttttccttgccgccacaagtaaaattcatacagattttgttctgcttctcctcttagcactgcatccacacatgaatcttgcagtgaaatctttggcaacaaggttgcatgtgtacctgcccagtagacaaatattccctgattatgtagaagttttgatgcctcaatgacagacaataggttcggagaggtcataactgaaaagcctacagcgattgcgccctcgcaaactttcaagagttctttaagattctctttagtgtttactatgtggcgaactatgacttcaacattatttcgttgaagaacagatgccgcaattaatattccaaatggcggtgaaaactgtctgtggactttttctgtattgttttctatattgactaagacaatatgattcataagaaatttctcaaatgtattacttttccatcaaacttgttactattttgcatttcccaaaattcgctatgattaaccataatgatgatcgaatcatacagcctcaaatcaggcttcgtaggaagtaatgatatggaatattcccttttaacttgttcaatattgactaacgggtcatagcactcgacatcaataccacgagcttctagaatttttattatttcagcaactttagtattgcgaatatctgcacaattctttttgtaagagaaaccaagcagaagaatttttgctaattctttttctgacacaatatctaagattctatctgcgaccgatgtaaccttcttctcattagttttacgactttgggaaaccaagggtagatcgacaccttttatggttgccctgttcaatagataatatggatctacaccgatgcaatgacctccaaccatgcctggacggacatcattgaagttccactttgttgctgcacaatctgtgacctcatttatgtcaatattttcagctcgacaataatctgcgaactcatttgcaagagcaataacaacatctctctgaacattctcgtacatctttgcagcttcagctattttgatagaagaagcaacaactacgttttcttttagaacggactgatatacatttgctataacatctcgagcatgaggtgttgatcctgacactatttttctaacattctccaatgtgtggatattgtcaccgacattaattctttcgggtgaatatccaacaaagaagtcaacattgcaagtcaatgacgagactttttctagaattggtacacaaacttcttccgtagcaccaggatagaccgttgattcaaaaactacaatatcgttttgatagagaagtgtagccaaattagtacatacattcttcaatgctgttagctttggtaaattatttgagtcaacaggtgtgggtactgcaacaatataaaagttgcaattcgcaatatcactccattcgttgctgacctggaatctataagtttccttaataatggactgcaagtctttgaccttttgcgcatttatatcaagtcctacacacctatatttactggaaagcagttgcaaaaggggaaaaccaacgtatcctaaccctatgactgcaatccgcagttgttcaatttccatatttgtcatcttcatgattcccttctattcaatacccagtatttgttttataaacttagtttcatttctgacattctgagatggaatataaatggaacgttctttactgagcttagttaaatatgcccttacatcggatttaattgttggatattctagtatatttttatcagctataataatgctgtgatctttggctcgactggttgcaacattaaataaatgagcgtcagccgttcttatatatgacacattaggtatgaagaatattgcaatatcagttgttaagccttggattcttgcaacagtatctacaagtatgttaggatacgaacctacattttgtactattgctttttgtaggtcacgcgtggatttcctcatgcacgacaagacagcaatatttgtcttgcgagattcttcatggatacaattaacaatatatgcagctaacattattgcaaattccggtgatgaattaccagattccatatctgtgtatacaagggtggggccaccatcgtcatgcaatattttgcgtaaagactgtatgatgaacgcagggacatcacgtcgagactgaagagtattgttgtagaatattcccgtatatgatgcaccacgtttgccaaatctgaatgtatttgttaattgatagataggcaaagaactattgtctgctaatactttaagaccatcaactagattttgatacttgcaaatacgtatgcggtctttgttaagttgtacgattggcgatagttgttttatgtcaccgacccacaagttttttttgcccaacttcttgctcgccgcaaacatggccaatatagcctggctcgcttcgtccattattacatagtcaaatggtgtttccaatgttgcatcggcagcaaatccactaataatgtaataagtggataataccaaagctgagggtattggcataacttgttttaaagcagtaagttttggctgctctgttcgttcgtccatcgataagcctgtcttatagatttttccatcattaagcatcttttccattgcaggtttgtccgcaatctccatcaaagccctatttgttaaggccgttacaagaacagatttaccttcactacatagttttgcacaaagagaagctatcatataggttttcccagtgccgggaggtccttgcagtatcatagagtcacaaaggttcagctgattgtaaacaaaatcagctgtatctttgctttttacaggtattggttcccaatcatgtccagaatagttcatgtctagaacatcggcaacacctttactctgggtgtccttagtgagtcgttgcaaattcaatgaataatcaatcggtggcctttgtggagcaaaaactaagatcacaccaggggcttctgacacagcttctgcaaaatcaacactaactctgttgaaacctactaaggaaaattgtttgtcatttgcagcagaatgccagatgcaaacagaatcagtggagatatatctttgtttgtacaagtctctataagtcaattcaccccaatttctatagttgcgtaattgctgaggaagcaacatgcactctagaaactctcctttacgaggtagagctcttgtattggcgagcttgactatcatttctcctccacgaaatgacacgagctgaccaacgtacatctcctcgctgttttgaagcaaggagatggccgtagtcaaaaatttcttgttaaactcttcggtctctgccttgagttcgtcttcaagaaattgccaatgttgttgtcttgatatttgcattataatattgcttcttcactatctagaagtgtaatgttttctacattgataccagccgcaggcaaatcatgtaagtctttcattgatattgtagtatcaatttgaatctcatcagtcaatttgcgttgatcattgtaaattggaagactggctccagatgtatatacatctgcaagtgacggaattaattcgtcacacaccttttttatgctctcaatgcctaatgtcaacttatcaggaacgaaatcgaaaggtgttgctttcttgaaattttgtggcatattgttgccaaaatcaaagcagacgctagatttagagtagtgctgtccaacagaggctagtgtaagtaatgcggctttactattgcttcctgcctgctcgatgttcatgtttacatttctaacaggaagagcatatagtggtatgcattgtaagccagatgttgtcataatccaaagcattgaacctggctgctccaaaagctgccagtcataccaattgaggtcaaaatatctataatgtggacctctatagctatgaacgacaagagggagttcttttccgtctggtccatatattccatagagttggctatatgagtccaaagcaattcgttctttatcaaacgtgtatccaccaagatctttgaaataattgacaacagcacgttttgcttcagtgacataagcaacaatttcttcgagggataaaccagaatattgaacagcattaatatttaacttacccgaggcaaagggtgttgtcacatcaagaattttatccttaggggtaacaacaacatcaaagtcatctgtgttgatttcctcgccattttcagtattggttaattgcgcaatcttgtcttgaagttccttaaccttttctgtgagggctgttatgtcattattattataaatgaagttttgtaattggtctgtagaaagcttgttaagcttctgtattagatccaatttctctggcgaagccaccagttcgctgatgacagacagagttttctcttctccaattgagcctactataagtttgtctttgtaacggtcaaaatatggcgttgcatctttatattctgcgtgcttcttatagaatgaattcatcttgagaattagttccgcaaaagatggtgcttgaagacttcgaccttcgctatcatagtcacgaatgctgtcatcaatcgttttcaacacatcgcgtgttgtaagcacttgagatgtaggaacaaaaatttcagatttcaaccccttcatcataagcgtttctttataattgacccctacgcgttccattgctgcgatttctatggctatagggtctacgtccttgtctctagaaatatcactaagcatacagaaatcaccgttttggttaatccataatccataatcctcatttacgtatgatgcataattcttgctatagcagctttctgtgagttcgacaacttcatcaacataattaacggcatcttcaaagtctaaccctgtgtgttcggaaagtgatgatacattttcagattcagcaatctcactgcatacgtattttaaggcatgtgcatggaaaatattccaataaaatccttgagagttttcaatgatctgtatatcagatatgttgctgtctagtatcttgtataagcgatataacttatgacacaaactatcgccactcttttgagatgaagggaataatgataatgccgcctttgaaatctcaaggagtttgtctgcatcagtataacgagattcgaatttttcttttatcttttcatataaatctgctacattatatgggtcgtgagaatcgtaaccaacaatccttttgtcgagtaaaacgtcctttatgtcttcatcagtagcagttaggtatagtgtctttagtgcttctggtatcgctgcatcaaaatataagtaatctaagcttttgagttctcccagttggttgggataaatattcttgttatgaggaattggaatttcattttcaagagccagattcctatattcattgagccacgaaatacattcttcctccgaatgtgcttgtggattgtcaagaagggtattgcaaataccctctatagtagaagcaaaatgttctatgagatatggagttgcctttattataaacttatcagcctctttccataagttctttggcaagttctctaaagtcaacatatcggccatgtcggtatggaacatacaaacataagtgtacatacgaagacgtttcttactaaagtcttcatcaatagttgttgtataccccataagatcacacacgaaatcactaacatcattccatgcgctgtcatttaaatactttccttgtgacacgaaatctgaaaggatatcattctgctcctttatcaaggagttgaaatcgtatgagtcaattcctgtcagtacggactcatcaatttcttcgcataaaagttcgtctttcaaatcgcgtccaatgagaccttctgccaatgatttcatttcattaggaatgcgttggtctgcatcacaacttagattctcaagcagcttaaattcgcctttttgatttggtataatagcatattcgtcaaacaaagacaaatctccttgatcaactataaacgcataaagagaattaagccattcgtaagtgtctgattcattcttttcaatacgacttgataattcagaaacgctacctaattgacttaaatcttcaaggaacatttcttttgttacaagaagatctttattccattttattacatcttcccattctatttgttgattttgcagtggtagacagccatctgtaataaaaccattcaggaattcatagaatttcttattagcggtttttgatgtcgacgaatagtaagggatacgcaattcagagaccgccatgtaaccatcataggtttcaacaagcggctgatttacgattctatctctccaagacttaataagattatcaatccagggctgagcatagtcgctatcccatgtatttgtgggcttaggctcacgagtgctggctataagatatgtctttttggcattgtttgccacaagccactcattaaacttaagtgcggcttccactgcacagtcaatgattacacgattcttttgagacttatcttcgttcttgttcagcagaatgccatcacggggttctgtaggctcaaaatcaaatccattaagcataaatgggaaataaaattcttcggagcctattaggggaaaatctctaaatagtacaggctgtgttttctcgcgaccaaccaaataataggcagaaccatcccacactgtttctattgaaagcgcaactttgggcattttttcgtcataggtgacatatgtaagaaaatactttctaacctcatttatcttaacagatgatcgaataatgtcgtgcttgtcatcatgcaccaatatctcattatcacacaaatatagttggtctgtacctgtgatatgatttataacatgtacagactttatcttgtggatagataccatggttatcggaagagtattaaccaaatcatctatacccacttgagcggattttaccgaatcctcatttactaaatggtaagtgaatgaggtgttaaaatcttcttctgaacaatcttcgtaatttgtaaccagtggaaatgtgtcaatgtcatcttcatcgagtttcttaacccatgtaatattctcaacaattccatctataaggtcctcagacttcttagcagaacggtccaatattagattgaatcggtgaaatctatctgtattcggattcttcactattccataaacctcgattattttcgacagcaaatgagtagtgataaatccagtgccgaacttacctgtttgtctaactacgccttggtttgcggaatcttttgaactaacctgttgaattaggccagttaaattccttgttgtgaaatagtcaccgttatgactaaacactagccgatcattccataagtctattttgacagaaacacgttcaaatctgtttggcacgtcattagcattttgcattaactcccagacccatctcttgtctgatagggcagaattgtatattttgtcaagcgcctggattatcttgtcagctacttgcttgtaattgttgtagttgatttctttttcaacttgatttctacgatccatatattatggctgccttataattatttacaaattattatttatgatgtaaaattgcgttgattatcattcttcctatcttccgctcaaccccagctttagtggttggtattcctgttactttagtaaattctctttttacttttgttactccaagagctctttttaaagagaaactcagaccaggtatttttgtattactcattcttattttgtttttatttgttctattgcaaagttacaatttgtagttcaactagaaacatatttgaatagtctactgtatgaactatgctctttgctgtacgaaatgaccggtttcataaaaataatgcacctaatcgtaatatgctcgtgtttcacggaacgtgatgacaggggtaagttcttttagtctacttgcatcgcagatgctgtccaatgggatgatagacgtaagttctgacttgagccacaaagtattccatacttgttcattctcacccataacaagttgacagagacgaacgtcatagggatactcaccagcctttttatcgtgctgataactgatgttctgcaaccatatctggtcgtatgccgagtttggacgtttgcaaagcttcgcaataacttttccaagaatgtcccatttctctttgttgtctttcattgagtcgacaatgcgacttatgacgcgcagcacataatgtaccacactgacattctcaatggctatctgggtgccgacagcggcaattgcccgaatgttctcaactatcttaccaggttcttcaattgtctcttcggaaaactcactgaagatgactccctctgctaattctttctcaaccttcttcttgcgtttcttaggcttcagacgtttaatgacacgcttgtctagatctgaaagcatcgtcttgagctgaccaccattgggatattcgcgaccaaacatgagaatgtaaagcaaatgcttctggataccgtcaaagtcaacgcctttcttgttgaagattggtgtattcttgatataccatagtttgtcagacttgatggagtctgtaacaatattttcagaaatctttgtcttggagctattgagacgaaggttcaaagactcaaggatatgttgaatcttatatgaaatcttttctagtgtatcacggtcattgcagaaaacacgatagtcatcacgatagcgaagaatctcatacccagtgatgccatctgcttccaaagcctcatgaagtaacaggtctgaataaccaagcacgaactctccaataaagtcaaaaatgatgcttccttgcggtatgcctatattacgtccttgctggaatgcacgtagaagcctgatgatattggccgccatttcatgatttttatcagtcggacaagaagtcttttttcgtgacaacgcccagtcaatgctctgaggattgatactgccatagcagtttgtgatatctgtcacaaacatatatctatattccaaggataattccaaagaacgttgctcaatggaattccaccaattcagaattgtagtggagttgtgaaacggttcctttttatcttcattatccaatactggcaatgcgcatgacgtgatatggggaacattatatttatcaaagcaatccaaagaagccttccaacctttttcattgcagacttctcttacgaggaagtagtaaagataaggattggcgagagtaagaggacgcactgcatacttgccatccttattggtaagtaagtccatattgacatcgtctaggtcatcaggaagtgtatcagagatacattcttcgtatggtttgtctccaatagtatccttgacaaaatcaagaatcttgtcgaatgtaaagtattctgggagctcgaagttgtggtatctcttggaacacaaaaaaaagcacattgcttctttactgtttagggaaagtatatttttactcataatggtttaatcttctacgtattcgaggaactgcttaggtacatatgcggtggcaactgtcatcaagtcatcaatcaatattcccacacgcagttgtccctgaaaacgagccacccggccaacgactcctttaaagtcaccttcaataactctgaccagctgtcccttctcgaatttatgaattttctcgtcataaaccagagtgtcttggttttcaacctctgtaattattcggagactttctaactgttgttttggaataatcaaaggctccttcgttatgattctaccttcatggtgatgcttatagtagaagcgcaagaatggcaggtgcacgttatcgtagacgaaattcttaatctcgtcaaacgtaccgtatgcaaaaaagatgttgggaattcttgaggattctacaactttctcaacccctttaatcgttttaaaagttgaaattttaggataataggcagttccaccatggtccacaatatagtcataagccttctgttcttgcccataagtggtacgaaggatataccaggacctagttggcgacattacactattggtggacaccccagaattagaatcaccatccgtgaattcaactctggagggcgcgttgattgcagaatcagcgcatgatgatggtaatctgccatctatatttgaagcatctgtggatgccgaaacttcattagtaaacacgttctagacagaagcagtttattatcagtttatcaattccttaatgtgctagagcacaacgcggaattttggtgtaaatatagtgatttttaaccataaaatcaaatttttaccgctaaaaattgcgttttaatctatttactgagctttcgcaagtgaatatatatcaacttgtgaaagttcagttaataatatgaacgcacgaaatagggttttattatatccggcataagataatattgctgacactcatggcagcatagaataaacttcttcatacttcgcctttaggtcaagtcccagtgcatatgggtgctctgtctgttcattgggtcattataaaaagagccgtgatgcattacattacatagaccatctgaaaatacatcatagtctatgtgaattcggtgttaatggtggtgaagcagcagttgcattattcctttatcttatagttgaagaagtaggaggagatgcagaaatggcctgggacaactacatctatgcctgtgatgcgttagatcacaaacactcaaaatagcctcatttaagtagtctatggaagatagatatactatcatcaaaggcattaccacccaattaaaaacagccacattgtcgattgtcttttttgacactaaaaagggagtctactcatcacaagcaaactcccacaaaacgagaaaaatagtcttagtgctataatttcaaaatttatgtcttgatatgtatatatgtgtacatgtattcacgtgtacacatacacaatttcattctatttcagcaaaacaacgatagtaaatcgatttgcctcattagctttgtatttgtctataccgccatagttaaaggcttggatttggcatttatctacacctcgctttatgagagccttggctatgtacttggcacgtcgtttacccaaatcatggttgccagattgggttccagtggcactgtcagcggcaccagatatttgtatcttcagattttcctcttttgcaatcttggctatgtcgtcaaggttaacaagttgtgactcatcaaccagtttgtcagagttaagtttgaagaagaaatacacaggcacaccaacacacactttcaagtggtcagaatgtgtaagggagtctgagcgattgccattgatgttgcctaatgcattgccattttctccatcaacggcatcacggtcgcttactccaccattgccagacatcgagagacgagcacggagtgagttcagaccactatagctatttttaggatagacggtcttaccatcgctatttcctgcaagtcgcttttccaaatgagcattcatgtcattcatataagccaagtactctttaaggtaggtattttgctcgatatatggagttgcatcaacgacacgcttccaacctgttttgcctatgataaacgacagacctgcagatatggaaatcatattgtccccaaatttcgtggagttgccgatgccgtcaaagttctttgctgtaagcattccactgacttcacctattatatgaactcggtcgctgatgcggtaacgagcttccactccataggtaaaggcaaacggatgactgccacttgaaccgccctggcaggtacagttgttgatccagtcggaattatgaatcatgccgacacctacgaagggaatcacatcccaaagagggattccgctttcgttctgacggattccggacgtgatgttgtacagaaagtctgcatggacaaactgatacttcatcgtttggaactctgagttcttgaagcagagtccctgaaatcctattcgtccaccgattgcgggcgtgaaccatttgccgactcctatctgcaagagaggagtgacacggtcgaacacgtcaccgcaaccaatgggcgtcccaagaaaagctgaagccccgccctttgcttctataaaccaatttctaccccagttggctgcttcgcttacatgcttgagatatgtaggattaacaggcatgagcatctgctcctgactgtatgatttctggatataaagactgtcagaattctgtctggctgtttgtgccgaagctgtcattgcagccaggcacatcattgctgttgataatattttctttctcatgttgttgtctttgatgattgattacttgcgtaaacaaatgagcatggtgttacattttctttcttcttccgacggacggagcacacatctttcgtgccattgccaggcatcttcttgcccactccctatcgtcttcatccggtcgcttgccccatcctgagccagggctgccgcctccacctccatacgtctgagcgatggtcgtggcatcatccacgaaaccgcacacgaggtttaaggctaccttgacgacatggtttccgtcttctgccaactgacagagaagcgtgccgtcgaagtcgagtttcacgctgtcagggagattcgggaagcgagtggcaaactcatgtgccatggtgtcgagcatcactccgttgagatggtagctcatgttgtgagcccaggaaagttcagactggttggctttgtcttccagttcactcgcctgtttctcaatctcttccttgtccttgcggagggtgtcaagcaactggttggtctcagaaagtttcttctccttgtctgccagtttatcttccaccattgccttctgctgttcaaggctctgaatcttacgggcgatgtcggcactgatgttgtcgctgttggcttgcaaggctctcagcggtttgagttctgcttccagacggtcgatttctgccttcagattctctatcatagaggtgaaggatttctgcttcttctgggcgatggagagttccacattcagatcttcgagggctttccgggtgttcagcatctgggcttcgagtgtcacgcactcgttagcaagccatcgtcgatattcttccgttgaacggtgacgtgctccagtctctgctatcgacacccctctcgtgagtccccatttctcattgaccttggcaagttcgtcgtgcagggcaagaagatagttcttgtaatctatgcggttctgaccatggaagattttcttgaaggcgaacttcttatctttatctatcggcagaagcgcacagtggacgtgcggattcttctcatcgcagtggacgatgaaggagacgatgttttcctctccatatttatctgccacaaagcggtagatgtcctgtgcccacttttctatttcgggcattcgacggatgtgatcattaccacccttgcttttaaaatccacctcctgattgccaaaggcaagctctcgcatacgttccgttgaaccgccgaagatgaaattcaccacagttcggaaacgaggctctgccagtccttcgttggggtctttaatgccacgtgaagagagattttctgccatgcgtctggtaagcggacggctcttgtctatcggggcgacaatgccaccttgacggatctcgaagttgagatgctcacggctacggtcgtagttgccttcacgcatggcctggttccatcccttctccgtccagtctctcaactcctcgttgcctaccgaagcaagacctttggtaaccttgatgtccatgacctgttttgatgatgttcccatatcgtatttctttgctatagtccttactccaggagcctttttcagtcttggcaacacaaggaaatctgacccagcttgctgtttatctggtcagccctcccgactacttttgtaggtcggggtattaggcttcccaagactgaaaaaaagtggcacgtgcaagcacgctgcctcacgttgcttgaaatcattcagcgatgtgctaacgggcgtcctgatcgccatcagcgtgcctcgcatggaataaggggaatatgactgttgtttttaatcgtcggaagactccgcaggtgctaccttttcggatggctccctggcctcagtaagaggacgagggggattcacatagtagtgggatgcggagccggagatgtagtgctcgaagatgcaatccaggagtactatctccgctttcgaatatcgggttgccacttcgtccatataactcggcttggtattgccactgatggctttagccagaatgccgagagaatctatcactttgtgccagtcccagacgtggtcttttccgaagagcaggctcacggaatcggaaagttcctcaggcagttctttctcctgattgagataacggaggatggaaactgccagtgaatcgaacacctgggcttgctggttgagtacacgcctggcaggaataccgccatatccttcctgcttggccatgttcatcttcaagtcgtaataacggctgtaggaatcggccacttccttggcggtggatctgcccttgatgaagcggatgaactgcatggcgcagaagtcgaggatgtcgtccggactctcgataagaagagacaaacgttgctccaggttgacagagaagatgaagctcttggagtatggctctacggaaagctgaccaagtttgatgagtctggagataaactggcgaaccgtggcacgctgccattgccactgacgggcaagttcggaaatggtggcaacaaactggccgggcaacagctggagggctccatcggttcccggagactgataggctcctgaggatgctttcgaaagcaggtcgcagtaggcttccagcttgctgtaacgttcctctgctttcggcttcagaaactccagcaacgaacggtcaacacctctgcatctgtctgcttcgggcgtctgttgattgtgacgatgagtcatttgagtcatttttgattttggaatgttgagcaagtggatatgattctgtgccagttgcaggtggcacctaatagtaatttctgataatcagcgcaagcagttccttcgggttgttgatggcctcaggatggctcttcatgcggagcacttttccagatggatagaagcctgctgccacgctgacggtaaagaggaacaaagacatgctgttcatataaggtaaggcgtagcaaaccatcgagagcagcaaggtggcgaaccacagtcttttcctctcatgcaaaagatggaaggtgctttctgcgattttcctgttcagaagcaccaaggtcaggagtgttgacactacgacagagagattgggagccgtgacatgacaacaccagttgatgaagataagcatcagtacaaccagataggcatagagatttcttgcgctctgaaacatggccatcttccacataaaccgcttcatgaatccatattcctttctgtaaagacagaagaacgctgtcagcaagaggaagggaaaagcgaacctaatgagggttagaatctgtatcatatatttctttattttacttgtttatacctttgtcgagtgattcgagtcgctcagcaattctgttgtttaactggatgttgtaactgggcgacatctggtcaacggtcgggtctttcgccagtttttcatcaacttcaataagaagacggagataaagatctacattagaattgtggtctaacttcgccgttggaacggctgccgatgtattaacacttgtatctatcggctgcatcgtatcagggtcgatgtcatcaggtagatggtaagccgtctgtatgcttcgcatcacaaatatgcagaatactatcaatagaccaattattgccttggctatgatgttcaagttgaataacatcagagctgacaccatcaccagaatggctattatatagaatgtatatacttttcgtttagtactcataatcatttaattcaagtttgattattccgaaagatgctttctctattatatattcgacatcacgcagagtaagggaatgcgttttgattcgcctttttgcagttgggtcttttttacaaagagataccagtccttggttcaaatcgtattcattgatgttccacgttctagtcttcttgaaagagtatttatccctgtaactctggagtgaaaggcctttgtagaacaaggtcttcaacattccgtcctgcaacaatctcatctcaatcagtttctccgtgtccttgacttcaatccatgttcggtatctttgtatgatgtctgctataaggtaatacgttttctggttcatttagagaccgcagttgaaatcgttcattatctggacgtgttctcgccttaccttgaacgtgccacgtttctcgtgcagtcgcaggtcttcaaaaaggtctgctgacattacctcaatggaattgtagattgtgacattcaagtcatgtattagtccatcgattgatgtcttgcagtttatcttgaacatacgctctgtgaccggatagcaatatgcgcaacattcatgtccgaatacagtttcaattgttggttcaagatggtagagaatggcaaggtctgcattcatttcaaacatatcaagtaccttgtctatgagttgggggatatgtacttcatatggaaggatggcataatcttcgtatgcctttgtctctccaatccaataattgtctatcaaatctggcaacagcattggaccagatgctttgaatttgtagatagcttcctgtaacatagtaatatttgattagatggttgatatgtataaacgcatgagttgtgctggtatcttgttggacacgtccttgttcacaaagtgtttgccctccattcttgttataatggctggataatcttttgcgatgtctgtcattgcctgaatttgttgtggtgtgagtatggctatagccaatgcatccatcgaaaggtatggttgtaacatcatccaaagatatgcgttagcctggttcgcacttttaatttttcctcgcttcaaaacgtcatggcaaacttgcgcgttgagaattaaacgccgatctgttcgcattgacatcagtacaagcgtttcagaagtaggcaggatgccttcggaggctgctttatagatattagaacagatgtctgccgtgttgtttgttatctctgtcatgcccattgacgagcattcatctatattcgctaggaatgtgcgaaaatgacggtcttcttcatgcaagaatgctacaagttctttctttgactttatcccatgtgctttgcttcctaaaaggaagtttgagtaattagctatgccttcatgcacatccttgtcaaagacgggtgatttatccaaggacatgaagaacttggtggcactttccttcaacgagtcaagctcatggctctctttatatacagatgtatgcaatttcacgtatgctacgtcacttagtgtacagttacttgtcagacgaagaagttctgtccggatggaatctgaaatttcgtcataccttgcagacagcccgcaatgtgccgtaaatgacggatcctttttgatgaagcatgataccgtgtcggcaacctcatgccatccattgatgaaagtagccatctgttctgcgttgcaccctgtgtttcctttaatcgacaaaaagaaattatgatattcttccaatgcgtcattggaggattgaaaatcatattgctttctgttgttacacgaagctacaatcagcatggtacataaaaaaagcaagtgaaagaataaactcgtttgagtcttttttctttcacttgcttcattttctttcatttggtttccgaaacctgtttcagaggagttgcagatgcaaccgacaaaaccatttaagtgtactatattccttttgttcattggcatataattgtaaattttgtgtgcaaaggtacagattaaaaaccaaataacagccacaataatcagactttgtataattttacgtttcatactcactttagtatgatttactaataacaacacaatttatgtacaaaaatcaatttatatccatttacacgagaaaagctaccagtataattatgattctgaatataattatgtacctttgcatatgtgtaacgcctatacctgtttttagcattatcctatactatcgacaataggcgtataacaatcatattatcagtagataaaacgtttttgacatggcaaaagtcggctacattatggctatctctcagtatgacaaactggaagaagaccgcaaatggatgaatgagtttgggtgtgttcgtatcgttgaagaaaatgacgagaacgaacgaaacagaccgttgtggaaacaactgatggtcgccttgaaaagaggtgacgaacttgtcatccccaaattttccaatgccttgcgtggcagtcgtgaactggcaacgttcctggaattttgccgagtcaaagtaatccgcatcattagcatacatgacaagatagactctcataatatcctgtttcctgagacaaagccgtctgatgtattgacaatgatgggagctctacctgaagaagttcttgctctacgcaaatcggcagagcatgtagtggatttgcaggagaagatgattgtatctttgccaaaagtatcttctgccaagatgaataaactcgacagggaaaagacagttatcaatctttacgtggcaggtcatccgatcgatgacatttggcgagcaagtggattcaaaagccgaagctctgtgtttcgcatactcaacaagcatggtatcaagctcaacagaggcaatcactctggaccaataaagaaaagagccgaacaaactccaaaacaagacataggagaatagacaatgaagaaaatactatttctgcatggtttctttgctaccggcagttgtcctatggcgaatgctttaagagaggctttcgaagggtctgccattgtgctaactccagacttgcctttgcatcccaaggaggcattgaaggagattcgctccatcatagacaaagagcatcctgacttgcttgtcggcaacagctgtggggcgttccttgcacagatgctctctccagtagtgggcattccagctttgcttggcaatccttatttcaagatgacggagtttctaaaggaacgaataggtgagcatcagtataaagctcctcgcaaggatggcaatcagcgccttgttatagacgaagcgttgattgatgaatttgccgaacttgaagccgtacagtttgattgctgcaacccatattataaagaacgagtatggggactttttggtgagcaggacacccttgctcacttctccccattgtttatagagcactacaacaatatctatcatttccctggcggccatactccaacagaacaagaagtgaaaacatggtacgcaccgcttgctaccaagatgatgatggagtattctgcaaaagaagaaagatacttccaacatttcaaaggcggcaagtacaagttcatcaattcagcatttgactccgagactctggagcgtatggtggtttaccaggctctctatggtgaacatgcatattgggtacgttcagaaacaatgttcttcggccaagttacaagagatggtaagacatttaatcgtttcacagaaatcgaggtttaataccaaaataattacgcgcatagagaataagtaatttcaaatgattatatatatagtaagacacggacaaacagcagagaacttgcagatgattctacaaggacatttgcctggcactcttaccgacaaaggtaaggagcaagtaagaaatgcagctgaacatcttgcagaaaaagacgttcagttcaagtgcattgtctcaagcgacctgaaacgtgcaatggactctgccaatattatctctgagagattaaaacttccagtcattcctatgaaaattcttagagaacgtgactggggaaaatatactggtatgcctgtgtctgaggcagcagacaagtataaaaaggatggaaaatggatgttccctgatggtgatgccgaaacagaagaggatatttatcaacgagctggcaaagccttacaagaactttcggagaaatttgccaatgataccatcatcgttgtcactcatggacagtttgcaagaaatatgatagccaatcattttgaatgtaattaccatgaggtcacttctttcgtaaacgcagagattcggatgttaaacctataatatagtatttgaggtatatgaacacattacatactatactgatatactacattctttgcatcaatgcagttacattcatcatatacggtatagacaagtacaaagccaagaaagcaaagtggcgaattccggaaaccacgctattgatgatggcagttgtaggcggaagcatcggtgcttggcttggaatgaaagtctggcatcataagacgatgtataagaaattcaaatacggtattcctgctattctgtttctacagattgcagcaatgatttatctgcacatgaatttataacaaaataaagaacgaagcgtatgaattttccagaaatatattcagcaacaggcatgatggagctgattcagaagatcggcttcctccctctccttgatagtggaattgaaggcttctctgccgaagacatcgttgcagaggactgcggttacgtaagacttcctgaaggcggctgggactggccgctatggaaatggaaaggcgaaattgtgcaggaaatgccgtgtatgtacggaaagttcttcaacaagaaagctggatttatcagccaggaatggtggccagacttctgcaactacagaagaagcaagttccctcgcccggatgaagactcgatagaaggagccattctctgcacgcttcaatcatctggcagtctcatcacaagagaacttcgggctgcttgtggtttcaccggaaagggaatgagaagcaaatttgacggttatctcacccgactggaaatggcaacctatatcgtgaccgaggatttcatctaccctcgcgacaagcacaatcatgaatatggttggggatggtcgctgctcaatactcccgaagatatctatggcagggaggcttgccaatgcaaccgaactccccaggaatcttatcagaggattttcgagcatctgaaagaaatcctgcctgatgcttcggataaacagattattaaattaattggataaaaatgagaaaggaatcaagagcaatggatagtgggtgggcattggaagtaatgcacaaggctccgtatataactgtaagtttcattgacgaagaaggcaaaccttacggcttaccgctgtcgtttgcatctgatgataatgtgaactggtattttcatggtgccttggaaggcaagaaactggaagctattaaggctcatcctgaggtctgcctttcagccgtaacccgttgtgcgcctacggttggtcctaaggacggcagtttcaccctacaatacaaatcagccattgcattcggcaaggcagaaatcgtgactgaggatgcagagaagattcatggtctccgactaatctgtgaacgcttccttcctcaacacatggatgctttcgaccagagcatcgcccgttccctttcacgcacggctgttgttcgcatcacgcttactgagccaccaaccggcaaacgcaagcagtatgataaggagggcgtggaaatgaaatatggcagaatggaataacgaggcaattgctccttctatgttgcattataaaacaaagaatttatgacttcacttcaagaaagactgttcgccatgcaggataagcagtatgctactttccaagccaaattgataccggggctgcctatggaaagtttcataggcattcgtgtgcctgttctccgcaagttcacaaaagagtttacaaaggaggcaggatgcgaggaattccttcatcagcttcctcacgaatactacgatgagaacatgcttcacggtctcctcatttccgaagtgaaggactacgaagattgcattcgtctgacagacagcttcctgccattcgtggacaactgggcagtttgcgacattatgtctccgaaggtgtttgccaaacacaaggagaagttactggcgaagatcaagacttggagtaaatcatcacacgtctatacttgccgctttggaatagagacacttatgtctcattacatggataaagacttcaaggcagaatatcttgaaattcctgcatcagcaaggagcaaagagtattacgtaaaggtgatggttgcctggttctttgccacagcccttgccaagcaatgggaccaggcgattccctacatcgagcaaaaccgccttgccccctggacgcacaacaaaaccatccagaaagcaatcgagagctatagaatcacacccgagcagaaggaatacctgcggacattgaagatgaattcaaaggaaaaattaggaataggcgaataaccatgaaatggagaaatagcctttctattatcccgtacaaaactaccacacttagcaatatttgtggtacttttgtactaaaattaggagaacaattatggaaacaaagaattcattcatatcatcagcaaacgtcaaagtgcaaggacgaacagcttactacaaaatgctggaagccgttcgccaaggtgaactgattcaggtttgccgtggcgtatatgctaacatagaccaactgtcagcatgtatggttgatattgagtctattgtccccaacggtattctctgcctttggtctgcctggaatatccatcagcttacgacatccatgccgcaggcttatcatgtcgccatcaaaagggatagaaaagtaaaagttccttcattcccaatgatagagctccatcactatacttccaacattcttgaaattggcgtgatggagaaaatcatagatggatttaaggtaaaggtatatgatgtagaacgatgcgtatgtgatgctgtaaagtttcgcaacaaggtgggcattgatgtctgttctgaaatcatcgacaactatctttcaagacctggaagaaacatcagcaaactaatggattatgccagacaattgcgtgttggcaatattctggaaaattatctacaagtgaagctatgagtaaagaactattatgacacaagacacttatacatattacgtttggataggtggttcatgtgattatggccataaagagcgagctggtggtgctgccgttgtgattgagcataacggcaatatcatcagccgtgatgtaatcagcgaccttcataccacagagttccgcatgatgctgacactaatggtcaaagtgctgcatgaacttgaagcaggttctgacatccttttcctgaccaacgctgcctatattcagaactttgacaagactccgactgcaaagtctgcaaatccggacttgatactacaatgcatcgaggaaaagaagagacacaactccgttggagtcaaaattgtacaatatcataaaagcccattgcttatggagacacatgatatggctacagaagcaatgtctaaaacaaggaaggagtttcatcatgacagcaaatgaacaagcattattggcacaaatgcaagaccttggatattctcatggtctttgcattacggcattacaaatcatatcccaagacaagttggctgtcagcgacatgcttgcctttatctatgacgaacaaccctcagaagaggactttatcaaggaaatggcaagaatgtgtgaagccaatagttgggacaccatcggttaaggtacgaatataataatcctgtagaagcattgagaaatttgcccctacaaacatatagtcggacgattatctaatgattatctatctgtctcgtctaaaatcgttatgcttgtcaccatgccaccatgcgcccaggaaggcgatgatgacacgaaagacaaagtagatgataattatatcaacaaattcgttcataaacttgatttttagcgtgttactcaatacacattaactacggggatgcccaaatgattggctttcttgaaagtgtagtatgttccacctttctctcgtccatcatagaatgctatgagaagggaagcattttccaccataaactcgtctctatcaagaaagcatcttgtataatagcgttctgatagaattaacacctcgtctgccgaagctatcaaattctcataaaccatcttatcattagcactgaacctatccgcctgacctctgaaaggaatggcggctgtcagcgtcattccaggacatgacgatttcaatgactgcactatctgtgctgccataaggtctatgcctatggcaaatcccgaaataaaattactgatgccatgcttataagcttcaagtatagccttagtcagtcgttcttttattagctccttttgtgagaagttatagaagcgatgtcctgtaaaggctgccgaagcagccttagcgaattttgttttgttcattcttttcattgctgtacgtatttgtatgatgtcttgccgagaaatatgccatttgtcacacgtgccccgacttgttccaatttagcggtgtagtcacaaaatgatgagccggtagtaactacatcatcccaaatgcagactatcttgtttttgaaaaagttagcatccacctcgatattattcttttccttcagacgctttgctctctcttctttcttgactttagtaccatgaactgcggtacgttcaccaataaccttgacatgagaaaagccgtctattgctcccgaaaaacggcaaacaagttctgagaagttcttatttcgtgcctcgttacgttcttgactgcttgcaggaacacaagagaaaacgacatcacgaaccttgcgaccgaattttttcacaagcatctttgctacgcactttgccacctcagtatggttgcgaccatccttaaagtcaaagatgacttggcggtcaaagaatgcatccataccaatatttttgatgcgtaccggataatagcggaaaaagctgttcaactccttatcctcttgtcccttgatgtaaacctgtaccatgttcatagccgttgtttttttttatttcttggtaggtagcagccgtcagccactacccatcaagaatgttttgtatcaatcgtaaagtctgtttaggaacgactgcaattctccgtctttgattgcagaaagtttacatggttggaaagccttttcctgctctaccatgattgtaccgagtccgtacttggatgcgtccaaagccacacttgccatttcgttggctgatatgtagccgtactccgtttctgccaaacctacaatgatgccgaaaagaacaaaatcgtcgtactctcgctgcccttcaagaatgtaccaacgtgcgttgccgatgaaaaacactgcgatgcaaagagcatccttcttcttactatcctgtgaataaagcggatagtccttcattgccttctccaagtcaggagtaatcaggcggttgttgtaatctgttgccatagtcataaaaattatttttctccctttcgttaagtcctttcggactgggatcgggaagatttttctgctttacaaagtgcgtcaaaggcaatagagcaagtctgatgtgaagaatactcttttcatggaaaaggaagattgttcacaaagcacgacttgccatttgccaaaaggcgcgataactttgcagaaaaagaatcccgtaatcccaagggcgacacggcatcaaagactataagtctcagtaagaagaaacagatacaaaaggtattgtcagaatggataaaacagctgggtgggaatagtcctaagcatcaacagccggtacgacaattagagaactctccaaaatgacaaaggaagaacgtgccgagcaaagtgtttagttttgcctggcaccttctgactaaggcatggaggaatgttctcgtcgtacctttggcagagtgttattctttcgtaagtcgatacaatcgacctgcgtaagaataactttatgacaaactgtcaatgcctatgggactatggtgtggggctgagcattataagatgtctcgtcattatgttgataaaaagctactctcattatcgtatgaggctttaaagtgtattcttgtacacaagtacacattaacacacggacatatgtattcacgtccacatgaatacatttaaacaacggaattattcagaatgatgacaaaatgaaaatcaatatattataaaaggtgaaagggagggaaatgaagggtgttgctgtgggccagtgcaccttctcgacgaatggacatgcagtagtgtcaaactgaataagtgggaaccgcttgcgtcccacctactcagtttgtaagataccgtatgtcgcttcgtggtgtaccttcccgctgaaggactttgcacttacgtcacgctctgctgacataaatgcgaggtctttcaggtggaactccagtggcatccttcatggtgtggggcgaagtattacaactatatttcccaagaagtataaaacacaaaaggctgacattcattatcatataaggtttcaaagtgtattcatgtacacaagtacacactaaaacatgtatatacgtattcacgtccacaggaatacattaaattatcaagaatagccaagataaagctcatatattataaaaggagaaagggagggaaatgaaggatgttgctgtgagccagtgcaccttctcgacgaatggacatgcagtagtgtcaaactgaataagtgggaaccgcttgcgtcccacctactcagtttgtaagataccatatgtcgcttcgtggtgtaccttcccgctgaaggactttgcacttacgtcacgctctgctgacataaatgcgaggtctttcaggtggaactccagtggcatccttcatggtgtggggcgaagtattacaactatatttcccaagaagtataaaacacaaaaggctgacattcattatcatataaggtttcaaagtgtattcatgtacacaagtacacactaaaacatgtatatacgtattcacgtccacaggaatacattaaattatcaagaatagccaagataaagctcatatattataaaaggagaaagggagggaaatgaaggatgttgctgtgagccagtgcaccttctcgacgaatggacatgcagtagtgtcaaactgaataagtgggaaccgcttgcgtcccacctactcagtttgtaagataccgtatgtcgtttcgtggtgtaccttcctactgaatgattttgctcttacgtcacgctctgctgacataaatgcaaagtctttcaagtggaactccagtagcatccttcatggtgtggggcaaagcattataaagacttatctaatgagaaagacaactacattttatataaatattgcatgttcataccattttataacgactacgcaaaaagatttcgtttcatttttgtacctttgcacgcaaattagacaaagaaataaaagaaacaagaaaaatcctatacggaatgagacttaatatgcacataacatcacaatcattcgttcagagctatcgacgctttgagcggaatagttatgtacatacatcaagtacatcagatacagccggtataggatttccacatcattattcgcatagttatttctatcgggcatcgtagcagcgtgccccacagagaacaaagataatattagagagttggagtttccttgccgggagaatccaactttttctttttagtcaactgcttgcatatgctctgacatggcgagaaaaagttggatgaaatccaaccattttttacgtttaaaatgaaagaactatgccagcaaataagaatgccttaataaggtacaaaactatagacaactgtttgagaaacagatacagaagatggactctcgaagatctcgtggaggcatgtagcgatgctctctacgacatggagggaatcaccaaaggagtatgcgccagaaccgttcagatggacatacagattatgagatctgacaaactgggctacaatgctcctatcgaggtttatgatagaatatactacagatacgctgatccagactactctatcactgaaatgcctttatccatagaggactgcaagctgataaagaaggccatcattcttcttgaaaacaagaaggataagaataacgaagacaccatccaggtgctaaacaaggtacaggacagactcaaatctattctgaacttcgtgtaaggataaaggatagaattatgaatgaacatcaacgaaacatcgtcttacaagaaaactgaaaggcttctcttcaggcaattttgcttgaaaagaagcctttcttatgtggagcttcaagtaggattcgaacctacgacctgctcattacaagtgagctgcactaccgctgtgctattgaagcctttgggagtttgatggggttcgaacccacgaccaccagagccacaacctggcactctaccaactgagctacaaactccatataaactccagatggattcgaaccaccacctccagaaccgaaatctggcatgctaccaattacaccatggagttgtttattttacttgtcgccccagaaggaatcgaaccttcgctaacaggaccaaaacctgttgtgctaccattataccatagggcaagttgagttcgggaggtaggactcgaacctacgaagtcatcagacagcggattttttcgcaagctcaaggaactccagtccgccctcgttgccactggagcactcccgaatttttaagtggagcctcgtggagtcgaaccacgttttcgggattttcagtcccgcgcatacaccaagtctgccaaagctccttactgatgttgccccagatggaatcgaaccaccacttgcagatccagaatctgccgcactaccgttatgcgatagggcaagtttgcggaggctaaaggattggaacctttgagacgttgccgtctgccagttttcaagaccggtgcaatagaccaactctgccaaacctccaatgttgtgactcgtgagagactcgaactcccgaccccgacgttcgtagcgtcgtgctctgatccaactgagctaacgagccaaagtgcggaagcagaaggattcgaaccttcggaacctttcggttcggcacgttagcagtgtgctggtttaagccgctcacccatacttccttgttttgatgatgcaaaggtagaaagggagaatgcaaccttttttcgtagcaagaaaaaattcaaaaaaaataaaagttttagtggaatcaaacaataattgccatttttgtatgcggatatccaatatgaatatttcgacacaaaaatggcaattattactaaaaaatccgaagtctgttaccttataaagaaggtttcgaccaacgaacccaactgtttatcagttaaattatcaatacctaccttatcaatcaatgcatattcttctttcttgttggtaatcacgaatttgcgttcttttccttccacttcacataaaaggtgatagttacctttgtacgccttttctacacgcacattctcaaaaatagtatcaccaattctgaacgaaacattctttctttgttctaacaatccccactctgccagatgattattaagggtggtttctacagcacctatccaacgctgactaacttcgcattcttctgcaaagtgcctgaattggccaatggcagaagcaacctcatttatgatggtttctacctttctgataccgttatctttgccaagagccaaagcgtcttcaagagtctgaccttgaagtttaccctgcatcatcagacaatgcatcttctcaggaaggaaaccaccgacattgaagatataagtcatatcgtatgccggagaaagttgccattgaccgctttcatccatcaggaacgagaagttcttgttgtgatcatccgtattgttggcaagaatattgaataccattctgcgaaagacttcctcctgggtgctttccggtaggcgcatcttgcgacaaaccatcagcaacttttcatagctgtcggcgtcaggatataaagcagccaatgtctgcatgtgcaatttgcgttcttcatcacgatcaaaacgatgtgtaatgaaatgcttctgaccttccacctctataatcttgcaaggcatcatgtttatacctgcagccatggccattttatagtaagccatttccaattctgcagacgaacgttctgcatcgccaaacttcagtatgcaataatcaaagcccttgtgaccggcaatctgtccgcttcttatttctcccgttttcggatttatcgctatgattgccttaggttggcgaccgccagctgatgttccgacagctatcaacgactgcatggtcagcgattcgtctggcataagtcttacattctcacgctcaacgaatattctctgggccaaatctgtcaatgctttcatattcagcttttccgactttctgatgccagaggattcggggataaactccaaagctcccatacctcgcttacctataaacgacagaatttcaagcggagtaatctcctgattgcgaatgccattctgtatgcgccagcactcaaacacctggttaccccaagcgtcaggcaaagagtctgcaagaaaaggaggcagtttgcggtaaagcttagtttccctgtcacccatgatgggacgtcggctggccggtgacttgacagaagccacaagtgggaacggatcaagtcttccgccaaggaaagctggattatactcaaaaaacgaaacacctctccttgcatcccaggacaagcgaccgatttccttgtcccaaagcattattttcaaagaacttgctatcatgacttcttatgtctaattcgttgaactttcttttcttccttcacaaggtatgcagatggcggtaaatctggcatcagttcgtcaagcgcgtctatctgaccgattgcctttagcaacaaaaggaaggtgctgagcgacacattacccgatgtaccattctcaaacttatgaatggtagtgattgtaatacccgattgttcagatacctctttctgcgtcatattactacgcagacggtaatccttgaatcttgcaccaagaagttttaccaattctggtatagaatactcgtaataatcaatcataatttgttattttaatttatactataacataagttaaacgaataatatagctatatattatattctacttatatttataaatgcaaaaatactcatttcttttcaaaatccatcaattagcttgaagaaaaactgatttttgcattctttttaacctttttacaaggaaaaaactcaatagtaacaaaaaagcgacccgaaggtcgctcgttataaagagaaggatttacttattcttcttggtcttagttctctgagatactggagcttcctccttctcttctgcttcatagaacttggttgccacgagtattactcggctatgcttgacaccttctgcatcctgccattcctcaggcttgaaatagccctctacagtgaggagtgctcccttgaccaaccggtcgaatgacgaggtattctcgttcttgcgccatgcctctacattcatgaaggctgaggtgcgtgtgttttcttcaccgttcttctcgattcggctgatagccagtgagaagcgagctacgcttgcggttgagaactgatggatgcttgcatccttaccaacgaaacctgttactgcgaaagtattttccatctttttcataatttgaatttttagaagtgaaacatttattttttacgatgcctcaagagttggcaagggaaacatgagaagcaaggaattatcaaattatttcaccttcaggcaaaaaaagttttatggatgagtatcagacgaaaaagtttttgaaataattctgagaatagggcatctggtacttgcagcaatgtggcttgtactaacttcgcagcggaaaaactaagtgtgggaacttcgttcagaaaattcaaatcgaaaaggtgacaagaaaatacagcagaggtttgagcaaaggatggctatacattaaaagttcaagcaagaggtaatgctccaagaatagcaagcccaaagaaagacatgaaaacaacacctcatttaagaatgtggcaacacggaacgatggaatataccaatgagtgccagaggaagcaactatatgcagaggtatgcagttggaggaacatgatgcaaaggacaagcattaccaatccatggctataagagaagcagaatagatggaacaaaaatctataggaacaagaagtatatgtcaatctgtaaacgagcaacttagcggtcgtgtgtttttaaaagaacattataaggatgatacgctcacattttatgtgctcttcacaaaaatagaggaaagatatttgacttataactggtaacttccaaggagaaaccgggtacgtaaatagaactgtgtcaaccctttagcttgttattcgtttagctcaagattgtttcaaatgtatctgattttcagatatttatccgaaagtaaaatttgaggttatcaggcttgttagggattgacacagtttgaattacggtctcgagaaaccttgctgtactctcagagaaaagccaccatcaggtaattcctaatggtggcatccaagttttatgatacatttatcgagagataaagtcataatttacatagacaaaatccttgttcaccggcataatacttattgccgttgatttgtccgttgtcgaaaacaaataaactccggattgttctgaaacaagctcatagctctgctgcaatgaacgaaggattgcgtccatttttgaaataggttctgtgtcaatgacagagtaaagtgccctgtcaagagagaaactatagacaatacctgctcccgttctcttatctgagtagacgagctgcacacatcctgccgacacttgttcactcatggtgaaatggttcattcgggaagccatgtaacttttcacatcttcaacggatgcgcctttaatgtgatatggctcaatccatatttcggcggttggttcctggttctcgatgccctctacaaggtcatcaccaccgcatgaggtgaatactaaaggagttgccatcagcatgagaaggatggcgattgaaagatactttttcattttcatgtcgttctatttttgataatatttatatgttgtttttatatacatgtattcacgccacgtgtgtacatgtatcaatgtgtatatgtatcaacgtattcatgtatacatggctacacgtacacatttttacatgacttccttgatgtcttttgttctgattttcttgactttaccatacttcgactcataagcgtcaacaccttgtttcataacgtattccataaaggaacggatagtgaaaccttccttgtgggcaatggcttgaaccttgaccacaagttcagttgaacagatgaaggagaagtgctgccattggtcttctttggaagatgtcttattgtttttaggactttggggaggattctgtttccccttggaagtcacatctgtcttgttatttttctcctgtggctggatggtagcatcgccaaggatattaccaaccaagatgtccatattcttccgtgccatagtcatcattgattacgtgaaattatctcttctgtcaatgcctgatagtcctttgctccatttgagtgagggtcgtactcaaagatgctttgaccactacctgccgactctgccagagcaatgttctcacgaatgcgagtcttcatagtgatagcctcgtaacgagacttcacggcttgctctaccaccttgttcaatttacgatggttgaatcttgcaataaacacgccaccaagccgtaggttgggctttactctctgcagtgtggaaacgaaggcatcaagcatcctcatacctttcaacggaagaagttcgggagtcataggtacaatgatttcatcagctgcgaggaaagcattggtagtgactattcctaatgatggaggacaatctatgagaatgtagtcatagttctgctttattggttcaagcagtttgcttagcaactgttctcttgccagaagattggtcaaggctatttctgcacttgccatttcaagggatgaaggaataaggtcaagattttctctgacgtgcttcactggcaagggtgcgccatcgaccaaagagtcaaagatgcttgcatcaatttcattctcattggggataaaatacaatgtaagatttgcttgaccatcaaggtctataagcagaacttttttccccatgcgtgccatgcaagccccgatagaggctgtggaagtcgtctttgatacgcctcccttatgattggctaatgtaataattctcaatgacataatatttttctttttgtatatatgtattaacgtattcatgtcaacatgtattcgtgtgtacatgtattcatatctacacgtgtacttgtatcaatgtttacaaaattctgcgtaggttacgagtgtccctaatgctcctcctgacaacttaatatgtcaggagaagcgtcaggatttgaatgtccatttactcaaaagtgaaagtacggatgtagaaatatgtctcatcgttttcgtactcatactcattgataaagtccatcatctgttcattggttcgttcaccttgctctatgccagtctttgaagtccattcctttattgcttcctcgattgtgccataaacatcatcacaacattcctcaaatggtttgcccgatgcgctgacacaacattcttcgggaaagtagttgccctcatcatgtgtgtaatagacctcacatccacactcgcagcaacgataagatatactcaactcaccgccaagaagtatgtcaatctctaagaagatgtcattacaggcatcccatgctgtttccgtctcaaaagaaagcagacatacgtcttcgtcttcctcatactcagcccaatagatatgacctctgacgcagatttgttttgcttcatagtcaataccataatgctttgcaaggtcactcaaccaaatgttcttgttattaacctccatactttgaaaggtgttccaaaggttgtttactgccttacgtgttcctgtgaccttgtaggtcgttgttgcttgatttgccataatcttgtactttattgattaccattctgtataataactctggtcgttgttctcgcattcctcattccattcttcatcggtgaagtcggtatgcaagcagtctttactgcaatagtaggctacacccatatccacgcaatacccctcacgcatcagtttgccacattcagagcatcttctgcaagttctgtcagtgttccaccaatagtccacaaaagactctgctacaacgtcttcgcttgtgttctcatcccacttgtcaagatagaatgtagcgaactttttcaactcctgctcattgaatagttgcttgtctgtgccactcactgcctcagtcagtcggctcaaaatagattgaattgttgtcatgcgatattatttttttctccctttcgtagatttcttctacttctgggatggttaaacaaatttgttgccttctaaaggtgctttggtcaaatggagcaaggttatgtggtcaaatactacccaaaggtgtggagattttaccatcatacacaagtgccagaccttgatcagatgaagacaaagctattacctttgcaacatcatttgttaccaccacagaaatagagaaatacatgcaatgctatttcttttcaaggaggaaatcatttaagtcattataactttggtatctatatgactcatctatggaaataccggggtaagcctttgctatttcctttgttgccgttctgccagcttcatcattatcaagaaaacaatggatagagtcatattctttaagatagggcaaaagcactcttacttcgccaacaccgttaaggacaaagaagtcgcattgttctataacagtaacaccattgtcaggtattcgagcatacagagtcatgtatgccaacatatcaaagaatccctcaaaaatacagcattgtttctgaggaacttccttcggatagatggctgaaatactctttttacctatacaacgtttgcttagtttatttcgagcttccatgccattggctacattcatgaaggcaatagcatagtatcgtttgcctcgaaaggaataatgaacctctctgcaatacttttgagctatggtaaaatctatacgtctctggataatatagtcacgaagtatggggtgagtgagggggcttatcatatcaacaaccgtttcatggttgtggttttcctgatattcactacgcttaccttcaaaccattgacgtttcttttcttcctccagtattctggcattataatcctcattgaattgaagtcttttctctttgatttgcttttcgagatagcctaagacctcatgcatcgtccatgacggattaagtcgctctacaaggtttatcagattgccgcctctgcctgtaccgaagtcataccaaagattatccttggtattgactacgaatgaaggtgttttctctaagcgcaatggtgaacaatagaacacattcttgcccttaatggaacctgttccataattgttctccttcatccaattatagatactaacagactttatttcttctattgtcatgttcattatagattaaatgcgcccacatgtgcgtgcgtacgtgcgtgtgcgcatatgtgtatatatataccctttaaacctaaaccttaaacttgccttgctttgcttgtttctgatttcctaaaacactctgatttatagacatatccatctttttctctaacgataatgcctttacctgttagaagtttaagaaggtccttaataccattgatacctcgcttgtaaccagcggcttcgtatgcttgcgaaacagagttaaccaagtcgttgtatcgtgtaggggaatttttctcaaacactttgcttaaaatatcctggtgtatctcattatcaaggctgacaagtgacttctcctgacgcttcacgacggtaacagaaatgccagagtcaagaacaggaagtttgttgtcatcaatatggaaagcaaatgtgctgaactccttatctcgcatgtgcattggtttaacctcactgatgctgttgttctgcatattcttgctaataataagaaccgtctcagctttgttttccaattcagtacctatatgaccacgagggttattatcgttcttgtttaaatgaaggactgtatggatgtgtagatcatatacacttgtccaggccattaagacagtcatcacatcagttgcttccttaccgttattgatgtcatacatgaggtctctcagaccatcgatgatgaccaaacctacttcatcgtatttacgtaaagcataatcaataagggctattcgcagtttgggtgtatattcacgcagtccccagaacataaggcgaggatcatcttttttgaacgatagtccagacaatttataaatacgttccagaactgtgtgacagtgatatttactctgctcagtatcgaaatataaaatcttccgtttgccttctggaagacacgctctgtagttcaataccgtagtgttggtaacagctgcggctaccatggcagagatattgaaggttttcttgctctttgctttgccagtagatgcactaaagtttccaaaggttgcaatggtacaatcaccgacgaaaagaattttaggcggtatagtaactttgtctgttgctttgatttcaccttttgaaagataggaatcgagttcttcgtcgctgaaattgtccttgtcaagcatagacacttcaagcgattggtgttcaaatgaggtcttttgattgtcaatgcccatcttattagttcttttttccattctgcttattcttttttatatctgttctaacatctttgacagaaatcgcacatctgtcaagaagttctacaaggcgcgagtctggcagattcacgccgtcaatgctattctttttcgttttcttcataattagtggaatcattagatattgttttagaagaacctttggttatttcggagctaagcaagttgctctttttaatccactcaatcagttccttcttttcaaagaatatcatcttgccacgtggcttgaaatgcggaatctcaccactgcatgtgagtttgtacagaagactctgtgagatgtcaaggtactggcaaacctccttcatatttagtatgtcctttgtcgtataaagagtttcctcaatggatttgagtcgctcattgataacttcaggttccacagttgtcaattccttaacctgcatttccaagagctcaatgcgtttagccaagagctcgtattctgttttcttttttgccatctacatatggatttgaaattagacattgagggagctacccccattattgaaccgattcatttgcaaaggtagaggaggtttgtcactataaggaacaatgatgctatataggaatgattgtttcgctattatatagttatgttcctttcatttggtagtctttattgactgatttagcactttcttgcaattagcggtcttatatctgattagatagagtgtggtgttataccaaaacatagcggtttgtactatttaggcgtttagaccgcactttttttagaatattttcactaactttgcaccatgattaagagagcaatattctatggaacaagccagggcaagttcaataagcacttcaccagtgatgatgattgcttcaaatacttgtctgaaatcaaatggaaagatgacacttttgtatgtacaaggtgtggcaatactcattattgcaaaggtcatttgcctttttcaagacgttgtacaaaatgcaagcatgacgaaagtccgactgcaggtactgtgtttgataaattaaagttctctcttaatacagcttttcacattgcctttaatctatgtacatcagaaaatggtgtaacatcaactgccttatctataaaatatggattaagacaaaaaactgcctgggatttcaaacggaagatacaacatgctatgggctatgtcgaggataaacctctagaaggtatgattttcgttgacacctttgagataggagattcaaaatgttcaccaaaaggcgatttggtgattatcggcatggaaatccttggtggaaagatagctggtcacgaatatgcctatgtcgttgacagtgcatcaccggattctattagagattttttcaaaaaacacatcagtaggaatagccaaatcatagtcggtaaagagagtagatgcgagcaatatgcagatgaatactcagatagtatagctacaagattagaatattcagctctcatggacaaacatgtatcaaatctaaagaagtggttgttcggagtacatcgtcactgttctgcagaatacattcaagactatctgaatgaatactacttccgacttaatggacatagggataacactgtattgtttgatacactcatgaatttaattgtaaagaataagccattgcattaaatgacaccattcttgattagcccgtacttttctcgaaatccaaaaaatcgcatagacgttcctatgcgatttaactcattatattttatcacattatcaatttaacaaaaagaaaatgaaacggttaacaaaaacgcccgttttctctctttttgtgcccatgttgcgtaaactgcgcaaaaaaagttgagaaagaattgccaaaggatgaactttggcaactttattgtgctgcctacgagcagtaccagtctgaaatcatcaatggtgagaagtcatattctcgctatgtaaatgatttctattactaccatcttcctgcgatgaatatgagcgaatcagatgcaagggttcatattatgaatgtctgcggtctgaaggaacttcttgaaaatcgtcgtgatctcgttgatgcttttttctcaaaagataagtttgaggaaaaagattatcagcagatgttccatctgtttgattctggacaaagccttactccagatgaagactgtctcgcacgattttcagataaacagattagcctcattacacagtttgcaaatgatgtgagtctctttaaaaatgctgtaacagattctgacatcaaggatctgttcaagtgtcaactcacaaaacctctccaggctggcattaacagacacgtagcattgttcttcggtgctcttcgttcctatggattattgcctttccgatggcagatgataattgaggagaacaaactcgttgcttcgtcagctaataacgagccactacgtgcaagccagttgcgttgtggtctgtctcaagccaaaaacgtgaaacttgcaaagatgaaatcatccaactacaagattgaagacatagggttcgaaaccgtatgtgagaatttcgccaagaaactgaaagaaagaatgtaaaatgcaagaaatccaaccaacaacaagtagggaagatatataatgaatatataacaatccctatatagttggcttttctacgcatccaagttgtaggagttacctttgcattcgaatcgattcgaatacggaggtagctcctctttttgaaaaaaataatcataagaaatacagacaatggacaataatacagaatgtcatttcattgataaaactgtcacattcgaccagtttgtcaacgaactagcgacaatgattgctttaagaattcatcaggttgaaaaaggccagcttgaaatcagccagacaaaagcgttccaaatgtatggacgtgcagatgttgaaagatggataaagagtggcaagttaaagccttccagaatatctcctggcaagaaacgatataagcttatagatttgcagaaacttgcgaatattcaacaaaactatctcttgtaagcgtataaactggctgtcaaataaatttaactcatttgactgctgtgaatttactgcttttttcccattctttttacgtgcagggcggctttttttgatgcgttcctgtgcaatttctgcctcttgttccacctctgcctctctcgttacggtttcggcggtagcaagtgcatcaatgcttgtcttgtcgaaattcgccacatcaaacttctgtacctcatcgtatggggtcatgtcggcatccaatccattttctgccacctctggtaaatctcttgcaccattatagaacgctttgaggtacgggcgtatggcatcgcccaagtctgcaatcatggctgttgcatactcggcaaatttgcgtgcgcctttttcaatatgatagacggccatttccgtaccaatggcaagtatttccgggtctattcccatattcatttgaccgagcaacttcttacgcatacgttcacggagttctgcataacgttcatcggtaacaagacggttgccattcggattattttccggcttagattcttgttctgtggcttccgctttttctgtacgtacaatctccctaatcttaaccttgttttcaagaatggtttcaacagcgtcacgcagttcctgattaaaattcttgggattacgtacaatctccaacatttcttcaggactgtttgccgtataattgaaacgtccatctccgatagggatagggccgctcacatcatcgcgcttcaacgtggtcaatccggtttccttgtcaacggaaacagaatattgccacaccgggctgtattcctgcttttcttcctgcttagatgtttccaaaagttgagactcagcaaactgcacattgccgtcatttacttctgacaaatcagacaaagacaaaggtggttgtgattgtgcatcggttgcatattctgccaagcgttcagcatcttccttgctccgcatcatgaagccttgcttttccttgtcccaccagcctttcagttgtttggcaaacattgtggtgtgcttccgaacggtatctctcaattcattgttgaatttcacaaggtgcatatccaacaccttacctctctttgtggtgtactgtgcaggagtaatggtatacggagtgtctattgattccgtcgtttcttcttccccaacaattctcgctacatttacatacagtttagcatcctttcctttatattggggcggttcatacgaaaagttatatacggtttgattgtcctcatctacaatagaaatatttcctttgtaagcagaataatcaatgcctgattctgtatgattccggttgctataatagtatttatcaagtttggatttatcggatgaatttacagaaacagagccagttacttcttctaacccgtattctatactctttataccattagcaagcaccttatttgctaatctcaatagcattttcacatcgccttcataggggggatgtgcggtatctgaatcacgtaataaatcattgaatgccttatactcctgtttcgtctttacgctcttatattcagcaaacgctttggtcttacggtagctgctgtctatccatttctcgaaatcttccaagtttacggcagtcaacaccgtcttgtgcttcttcgcccagtcgctgtcataattcgcgaagtaagctgcctcggcatcgtcagtctcattgaaaccaagcattaccttatgctcatcaaagctgccgtcctcattatactggtccaccacgaacaccctgcgtccgttccacccgtcaatatcgtcagagaggaacacgtctatgtggtctccgtccacgccctccgtgccacggatgtagccgtaggtgttctgcatagttgtttcccacttgttgccattggcatccacaccgcagcgcacactgcctttaggctgctcgatagtaatatcgaacactccgacctgtacatgacctttcttgtaattcccggcttctttctgcgcttcggtcggatttacattcacttccgcttctgctgctgcgattttttctcctaactcactgcttttaacagaattatttgtacctttgctgtcagaggaagtgctttgaggagttattcccgagtcctttgtggcagtctcggttttaattgactgctcatagtccaaaccttgcctttcaaccgaagaggtagtcgcatctttcggagtgcgccaaatgacacttccttccaaaagacctgtgctttggtgtgaagcgctgccggattgttcgccgcttaatggactcttaccggtgggaacacttgcagatgcggcatctgtagaagaggaaacatctttcgcgcccctctcccaaagcataggtcttttatttaaaccgcctattgattcataaccggaagtctttaatccataaaatttgccattgtcagaattgataagaatcgtaatcgcacgtttcccagtacgtttgcgcccattctctatggagaatatcaaagcaccgtcataacccaatcgcacatggtcaaaattattcataacatcaagcacaaacgaaacagcctcgtctgtagatgaaattcccaattccttcccatgtcgctcaatcatatggagcatcatgccgggggtcagcctgaatggagcttttgtatatcctatctcgtcaaagacttcttgcggtatatcggcaaggtctatattcccgttttcatcttgatagaaatactcgccattccctgatttcttttcacttagcgtatatctcgcttgcttgctttcactatctgcttcaattcgtttattgttgcctccaatcgtgcttctttgttcgtcagattcttcaattcttcttccactgtcggctgcccagtttccgttctcagttcgttttcctgtctgattatctcctcggcttccttgctgccctcgttggctttgcgcactaccgccagccaatacatcgcttctgcgttgtccatcatattcaaatttttcgttttcgtataataattcgtttctcttgtttaccgcctcgtttatggcttctgccagcgtcctcggggtgttgtccggctcttcaaacaaggttgtctcctgcgtgccctgcaccaagtcgtatatctccgcaaacatcccctgcatgaatccttggctgctgcccttgtacatcgccgccagaagcagtgcgaagttactgaaattatcggcaggaaggtaactctcgcccgttgcgtcatcaatctggtattggcgtttccagctttcaactgccatccgtgcctccttgaaatttttcgcttcggtaaacagtttgtcctgcgacaaggcataataagcccggattgagttctgtatctcctgggccatacgctctgcacttgggctgtcataatccctgaatgccgttgcgagaatagccttttgagcctttacaggcaatgcgttgaacatttcttcaagacgaacactgccacccttgaaaatgctctggtacatgattccgcgcaagtcattcttggcttcggcggtaaggttgcccttgctgtcaaatgcgctgctgtattgggtcggtgtgatgtagcctttctgcatcatccatttcaacacatttgtaccgttggcatccacaagaccggcaaaggatatttcctcatcacttgaagcaagcagcaggttggcgaacgaacgcatgtcattgcccatcttctgcatgatgttcttgggctttatgcgttcaatccctccgctctcggtgtcctgtgccacatactgaccaagattaatggcctccgcatcatccacatcaaccatattcacaaggacaggatgtttcataccatcaatatcttccgcttgcaagccaaactcgtctgcgtggtctttcagatattgtttgtatgtttccgcctgctccgagtgggctgcccacatctgacggagagcgtcacttcggttgttgccctgtatgacctcccctcgtgcgttcacggtaggcgcacccgtataggcggtaacggaagatgtgatttcttctggacggatgtttcctgcaatcttccgggaagataacaggctggcttcgtcattccgttcttttggttgcgcctcatcaatgaagtgcagaggattacgcacaccttggatatggctcggttgcaactggttcgcatcaatcactgctgcacggccgcctacaaggacatcatcgctgaattttacggatacatccttgccatgcaatgcctgtatcggttcttgcctgtcaaccttatgaccgttcatgcgtctgtaacctcttgcccgtgcatcctgcggcttgtcgtccaccatgtccggcactccgttcagggcttcacgctcgatgcgttccgcttcctcacgttccgcacgtaacttttcctcttccgccttacgcaatgcagcagcttcatcagcaatacgtctgcgttccatttccgactcctgctttctgcgcagtggggtaaaggcaatcttcttccatgcggcaagtgcggcgtttgcctgttccagctcctgctgtgcggtggtaatggcttcttttgcggccttcttcgcttcaatgcgctcgcccatagtaggcagagtgcttcctttctttgcttccggcttcgcatcctgcgctttcttcaacgctttctgctttgcgttgacaaccgcttcgtgctctttcacaatgtccgaaactatttccgtagccacttcctcgtcaccttccgcttcctccacaatggcatcccaagctgtgtcgctgtcgacctgctcatatagtggatttccctgctcatcctttggtattctctgcatggcaggaatattttgaggggcattgttatcattttcgggaatattttccgcataattgttacctttattcctggcagtgggttcaatgttgcttagagaatctttgccacgctcccacagtatgttgccgttttcatccgccatgctctccaccatgtcgtcaagctccttacggctgagcaggttcaccttcttgccgttgataggtgtttcggtataaacttcatattgttcatcttcatttgcattggatacaacattaccacgaatgatatttccattttcacctctaatcgtcaaaaggttatctttagcgtattgcggtctgtccgcttcttgcatttcctgtttgcgtttggcattctcaatggttctctgctgctcgaactgcgccacacgtgccaaatttgccgcatcagcctgttgctgtatggtttcttttgccaacgggaagatattcacgccgtccgatacgttaactgtgccgtccccgttatccacaataccgtcttcgttggctacaatctgaacctgtatctgtgcgtcatctcctgtaatggtgtatgtatcgccggggttgaatgtaaccacaccgtcaatcttgtcggatgcttcctgtgcgaactgttgaatgatagcctcctccgctgtcattttctcatcggacgggttcaacggttcatcaatgttcaatacggcatcgggcgatgcccattcaagtgcgcctgtttccgcatcacgcacaataagactgccgtccgaagcctgattgtcaatgccgctgccgtctgcatactgcacaaggtttccactcacgacatatacacggcggtcgtcctgtttcatcgttgccccctgtatcatgcctgtggtgcggttggtgcgtgcgtcaaccattgcgttgctttgctccacacgtgcgtctatgtcatcgcgtacacgctgaatcatgccgtcatatacctgctttgcattgagatagtcaagaaccgtttccaactcgctttctctccaaagaccattgttccgcatttcctccaatgcattcataggatgtatatccaaaaagccaagcgtgttttcatccactatggcagaaaccctctgccgctggtagtcacgcatattcttggcatcggtcatttcctgtgggtctgcgaggttgtaaccgtcaatgtagctttcattcattgattgcacatcctcgtcctgttcaccgccccgcttctgtgcgagagtaccgaggttaaagcccctcatcatcaacgaacgctccatataggtaagtactgcggctctctcatcgtcagagaaatccttgtcgttcacaatgccctctgccacacttccaatgtcatcgttggtcgtaaggtcgatagtcgcccttaacggctcccatatttctttgccaagcaattctgttacacgggcatcagccttgtttacgccgtgcttcattgaagcatactgcgctcccgacaaggttgccttacctgcacccatcaatcccatagaaagagccatgccgccccaaatgtcgccgtggaattgtcctatcgcaagcaaattggtgcgtgtgccgtccgggttctgctgataagcatcgtccagattgagcatggtgcgccacagctgaccgtagtattcttccgttacctctccgaaatagtcgctcacacccattttgttgaataactgatgtgtctgtcccatgataccgttcaacgcacctgcatcagcctttgaaagtactgcaccgatacgctttgcccccaccacattggcgagtttgctcatatttccaagagtaactacagggtcaaggtgcgaaccgaacatttccgaatagttttcaacgatggcatcggcttctccttgccaaatggcatttccccaagtcttgtcgttggaaaaatcatagtttccgttctcatcgacaaccacatcaccgagtttcttgtcgatgatgccggtcgtggttttccctgcctgtaccgtgttggtcatcagcggagcacggagaagtaggtcatcagcggttgttccgagagccttgatagtccagttggtggcatactgccccaagccttttacgccgttgttcttcacgtatgtcttgaagccctgttccgccatttgctctaccgtttctttgcctaccacctttgtggcggctttcgttccggctttggaaagaacattgatacctttgaatccaccgcctgtaatgccaaagtcaagcatgaatgcaggcatatggccggtcatcataccggctctgttccaaaagccagcgttcccgccatacatctgctccgcctgtcctttgttgtagagtgcgcccatcatttcattgtaggcttcacgttctccctctgtggcattctcacctttcaggtcatcagcgttcatcatggtaaatgcgtcacgcatatcgctcatgccgaaatcccaagtgcggaaatctcctgccacacgaccgaaaccacgccaaaagcctacatcaacaccttgctcacggtctttctgttcttcaaggtctttaataaattcctccgtttgacgaatggcgacatccaaggtactgttttccttgtcgctcatctgacgaggaacataggtatctgctgcaagcaagaatccaagaggagctgtattcttttttgtatcttcttcccattgttcatgcactctcttggcacttgcatctcgtttttcttgcagttctgcaagtttcagccttgcacggcgtagttgtccgcttacagacatatcagccgcctgtcggtatctgaaactctccatgtccgcaagtcccttactggtgtatctgttgccaagaggggtaatgtaggttttctccaactttccgctctccgagttgaatttcatttttccttctgctgtctgtcctccgcccaatggtgcgttttcgtgatactcacgcatggtttccatttgttcgctgaaaccgtccatcatctgctccgtgcggcgttgcatctgtcctatatttgcactgaagcgtattttgtcctgttccgtcagcggcttttcttctgccgtaggagttacaggagtttcaggtgtagagtccagggcaggttgttcgggctgttgttgctccgacatgaaagtcctgtagtctgccgactttacacgatatttcttcccctcacgctccatgactgtagaagcatcgggaaagtctttcataaaactgtcaatgtgttcatcacgcacattgtatttctttccgttgtattcaaatattggcatagttatttgtttttaccgggtgtataatcaatcacatcatcatcgccaccaccgggaacatagtccacaacctcatcattcagttccgaggtcatggtggcagggtcaagtttggaaagggaaagcatgattgcggaggctttgggcgacttgtgccagttctgtttcacatagtcctctttcttctgtggtgtatcaagtttcttcatttgacggtcaaaagcccttttctctttctcatcctgtggagagaggtcggcaagcatagcatcatacacctgctgcatagaacctttccaaacattctcgtaaatggctacttggtttccgccaccgtcagaaaaaccgagctgcttgccacgtacaccacgtgcggctgtcgctctcgctttatcacgctctacagccacattgtcattatgtctctttacttggaaattgtaggaacggtctgcctgacgtttgttttcatcatagtttgcttgccaacgcctatcagcttctttgtcccgacctttcttgtattcctgttccgcatcatatcggtcatctgcaatcttctcccgctcgttacgatgctgaataccctcgttgtatcggtcgtcattctttttgtcaagtccgagctgcctttgccaagaacgttcacggtgtgcttcttctgcatccgcctgtttcgccctaatcaaaccgttgaaatatgcagtgttcttttcatcacggtctttcatcaacttgtcatatctcactttggtacgttctgacatggtattcttaccggtgtacatatttggagcgtactgcgtggtgaagaacaagttcgagagtgccgatatgccgtcaccgatagccgcaaatatctggtctcgcttttgtttcttcttttccttttcaagttcctccgctgtcggtggagtatagggattgagttttttgtacaattcagtgtatgagagactgccaccgttcacatcggcttgtttggccggaggtgcagcgaccgtttcagattgggagccggtaacggcaggagccgcagccgcttgttgttccgtccatttctgtgtaccctttgccggggatgatacggaaggagcgtcttgctgctgttcgtgccattccttagagcctttgggcggaggcgtaccacctccgttacctaaaatatcatccattgttgccatattgaaatagtttagaaaggcatttgacttaccgcgttagttactccttgtacagctcccgatatggcattggccttgccttgctcaatggcattaagttgctctgtgagagcgttgtcgttttgtaagtaagtggcttcgatattgtccttacgtgcttctgcatcagcggcaatctgcgatgtcgcatcggcgagtgcctggttgtttgccgcttttgcagccgccacgctctcatctgtgccgcccatcacagccgccgaacctgccgcctgtttgtttcgctgttttatactctcttcagtttgcgtaaggatgcgttgtgcatcagcccgctgagtggcatcctcgttgtaccgcctgtcataccagtcctgattcttttgccgttgagcctcaacattgcgttttgctttcttcatggccttggacgccttgattccaccgaaaatgctgcctgcagcccctatggcacttcctattaaacccataagactttagtttttgattattaaaagttataccttgcgtgcgaaagtaagccgttatcttcgcatcatcattttatctttttacatacaaatcactatggcaataggaaaaaagaccggagggcggcaaaaaggtacgccaaacaaaataacggcactggcaaaagggatgattgagaaatggcttgaagcgcacaacgctgtacccaaaggagatgtgacgccattaataatgcaggactttctggaacttgaccccaaagacagggtgaaagtgtcgacagagttcattaaaatcatcatgcctaagaatatcagcatagacgatggcgaggtcaaactcaccattgaggacaagcttgtcaaacttgccggagaagaagacgaggaagaataatctattaccctctactttagattgtcttcatgtcaggggaaccccaacccgaaaaggggatgattttactgatttgctttgaagcgatgttcgagagaatgtcgcttttttcatgtccgcaagctgtcggaagcgttcaggaagcattcgggaataatggcacattcttccggaattattcgggaagaatgcaggattattacggaagaatataggattattcccgaataatggtggaagaataaggcttttttcgggaagaatgctatattattcgggaattattacggaagaatagccgattattccggaataatgaatgttaattttagcccgaaattcgcaaatgtacactaatagacgtgaattttaagttaaaacactctctttattacatttgttttatttcattaaccatttgattcttccggaataattgcacattcttcccgaataattccggaagaatgtgcaattattccggaagaatgtatgaaaactcccgtattttgccgtaaagtaaagtatatatatctactacgtctaccgcgcgtgcgtgcgcacgtgaggaaaatttcgattttagggcaagaataaaagttgaataaaaaagaaagcctacaaagaaaaataccttgcaggcttatatcatttcgtgaagtcacaaaaaaaatcagaatccttttcctttctgccgttggtacaccaccgtctggtctttgtcgaggttgacgattttgaacatcaccattgaacggttcggaatatcgtccggcagcacagttacgagccgggcaatcacctcgtccacattgttgaagcctacatcggtcagttccgccaccttttgcccgttgtggtatgcagccgcattcaccatgtagcggtacgacaaccggaaatgcacttcttcctgcttttgctcacgcacggaagctttgccggagaagaatatgaaatcaatcactttctcgttcagttcccatgcagaggagaaatcaatcttgatatacccgcgtgtcaccttgtgaccgttgctgtggttcatcccaaacgccacttccgagatagaggcacgtacatcattctgagctactgttccccatgtatgccggaacgtgtaagccgaataccactcttcctttggcattcccatagccttgcataattgccttatcccactgttgacattggcgcaaaaactgtccgatgtagtcatgcgctgatagaaattgaacaaacgctcatcatcttttgccgtgttcatgtatttttcaaatagcggctggatgattgccggcacccgcatttccatatacgcaccatccgcacggaacttcttcgttttggcccgttggtagtggataattccgttccggtaatcctgctttcttagattgtacaggtcaatcgtgttgattcctgcaaggcaaagcaccatcatggcaacatcacgcccgaactccgtctgtggatatttcatcttactttccggcagagggaatgaaaagaactcccgacatgcttcgggggtaatggcaagcttctccgcacgatcagccgttggtatttccactttcacccatgggttgactttgatacggattataccgttatcgtaatcgttgtactccaacatggcggctttaaatacctgacgcatacagattggatacatctcctttgccctatgcgtctgttcaagcgactttatccatttgttcacctgcgtggaggtcaactgagcgaacatcacttggttggttccgatgaaccgttccagatgttgtagggcaagcttgtagttcttggcattcctttcctgcccacggtcaatcattctgtcgatatgcactctcgcataatccgaaaaacaaatatcgtcattgccgttcataagaaaatccaccacttccttgaccgtccaatgttcaatgtcttttttgttgagccgctcgttatattccactatccgcccggcacaatactgaagcacgtaggggtcttcgatttctttcgctctggaaagttctttcttcgtgaccatcttgtcggtcttcatgaattgtgtccccctatggtgggtaactctaatataaaccggataaaatccgtccttgcgttctttttgaacacacgctttaaatgttgccatatcgttctatgtctttattatgttattatttaaatttattccaaacagcttccaatgtcttaactttctgtcatatcatcaattacggctctaaacacgctctaaacacccaacgaaaagcacaacaacattctctaaacatttgcgtttattacgctcatttttcgtgcggaatgaacgtaccttttaaaaatacaataggcggtaagcctttgtaaatgaaaagcataccgcctattttattgagtatcagctatatcgtgctattcctcgattgcagcctgcgccgccgcaagtctcgcaataggcacacggaacggagaacagctcacataattcagccctaccttgtggcagaacttcacggaagaaggctcaccgccatgctcgccgcaaataccgcacttcaggtccggacggatggcacggcccttttcggtagccatacgtaccaactgccctactccattctggtcgagcacctggaaggggtctactttcagaatcttcttttccagataaataggcaggaaggaagcgatgtcgtcgcgtgagtatccgaaggtcatctgcgtcaggtcgtttgtaccgaacgagaagaattcggcggaagaagcgatgcggtcggccgtaagagctgcacgcgggatttcaatcatcgtacctaccttgaactcgatgctgtcgcctgcttcggcaaacaacttggcagcttcggcacggataacctcttcctgctgcttgaactcgtacaggataccggtcagcggaaccatgatttcgggatgtgtctcaacgccctctttcttcagttccagagcagcgccgaggatggcacgcgtctgcatctgcgtgatttccggatacgtattgcccaagcggcaaccgcggtggcccagcatcgggttatgttcgcaaagcgcttccacacgctgctggatatactgcaagcttacgcccatggtatccgccatttcctgctgccccttcaaatcgtggggaacgaactcgtgcaaaggagggtcgagcagacgcacggttaccgggcaaccttccatagccttgaagatgcccttgaagtctgcctgctggtacggcagaatcttagacaacgccttgcgacgtccttccgcgttttccgccagaatcatttcgcgcatcgccttgattttctcaccttcgaagaacatgtgttccgtacggcacagaccgatgcccactgccccgaagttacgtgccacctgtgcatcgtgcggcgtatcggcattggtgcgtacctgcaatttcgtatatttatcggccagttgcatcagttcggcaaaatcaccggacagctcggcggccttcgtttccacttttcctttgtaaacctcgccggtactaccgttcagagagatgaagtcgccttctttcaacacaacgccgtccacctctaccgtgcgtgccttgtagtcgatgttcaacgctcccgcaccggatacacagcacttacccatgccgcgagccacaacggcagcgtgcgaagtcataccgccacgtgcggtcaggatgccttcggcaacggccatgcctgccaaatcttccggagaagtttcgatacgcaccattaccacgcgcttgccggcagcgtgccattcggcagcatcatcggcaaagaacacaatctgaccgcaggccgcgcccggagaagccggtaaaccgcgggtaagaaccttcgcctgcttcaaggccgccttgtcgaatacggggtgaagcagttcgtccagcttgttgggttcgcaacgcaacagcgccgtcttttcgtcaatcataccctggtggagcaagtccatggctatcttcaccatggcggctccggtacgcttgccgttacgtgtctggaggaaccagagcttgccttcctgcacggtgaactccatgtcctgcatatccttatagtggttttccagcttcgtctgcaaagcatccagctccttgtagatttcgggcatcgcctcttccatggaaggatacttggcggcacgctcctcttcgcttacgccggcaagttccgcccagcgtctggagccgataatggtaatctgctgcggggtacggatacctgccacaacgtcctcgccctgtgcgttgatcagatattcgccgttaaagaggtcttcgcccgtggcggcatcgcggctgaagcagactcccgtggcggaagtgtcgcccatattgccgaacaccattgcctgcacgcttacggcagtaccccactcatcgggaattccttccattttgcggtagaggatggcgcgctcgttcatccatgagttgaacacggcgcagacagcaccccacaactgttcgtaggcgcaggtggggaaatcctttccggtctgctgcttgacggcagccttgaagcgcttgacaagctccttgaggtcttccacttccagttcgttgtccagtttcacgcctttggcatgttttacctcttctataatagcctcgaacgggtctacatcttccttgttcaccggcttcatgcccagcaccacgtcaccgtacatctgtacgaaacggcggtaggagtcccatgcaaagcgggggttgcccgtcttgcgaatcagcccttccaccacttcatcgttcaggccgaggttaagaatcgtatccatcatgcccggcatggaagcgcgtgcgcccgaacggacggacaccagcagcgggttttccacatcgccgaatttggagcgcatcagtgtctccacgtgcgcgatggcgttttccacttcctgtttcaacagggcaacgactttttcctgccccatttcataatattctgtgcaaacttctgtcgtgattgtgaagcccggaggaaccggaactccgataaggttcatctctgccaggttggctcccttaccccccaaaaggtttttcatgccggcttttccttctgcctggccgttaccaaaggtgtaaactctttttttgtccataatatcaatttaaagtttctgattgtgattttttcattttttctgctcgcaaatctaagtatatttcacagactagaaaactttttgagaaaaaactttaagtcaaaatgcaatttcgagattgcaaaatttaatattcccattcatagagagaaattacggaaaaatacctatttttgccgttgaatttattatactggtgtaaaagtggcaagaaagagaaaagaacttcccctgttggaaaaggtggaaattacggatgtggctgccgaaggaaaagccatcgcgaaggtcaatgatttggtaattttcgtaccgtacgtcgttccgggcgacgttgtagacctgcaaatcaagagaaaaaagcatcattatgccgaggcggaagcggtgaagtttcaccaatactcaccggtaagagccgttccgttctgtcagcactacggtgtatgcggcggctgcaaatggcaggtgctcccctattcggaacagataagatacaagcagaagcaggtaacggacaaccttacccgcatcggaaaagtggagctcccggaaatatcgccgatactcggttccgcaaaaacggagttctaccgcaacaagcttgagtttactttctccaacaagcgctggctcacggcggaagaggtccggcagaatgtggtgtacgagcagatgaatgcggtaggcttccacattcccaacgccttcgacaaggtactggccatcgagaagtgctggctgcaggacgacatatccaaccgcatccgcaacgccgtgcgcgactatgcctacgagcacaactatccgttcattaacctgcgcacgcacgaagggatgctgcgcaatatgattgtgcgcacttccaccaccggcgagctgatggttatcctcatctgcaagattgagaaggacgaggagatggcgctgttcaaacagttgttgcagtacgtagcggacactttccccgaaatcacgtcactgctatacattattaataataagtgcaacgacaccattaccgacctcgacgtgcacacgttcaaaggcaaagaccatatcttcgaggagatggaagggctgcgcttcaaggtgggtcccaagtcgttctaccagaccaactccgagcaggcatacactttgtacaaagtggcccgcaacttcgcagggctcaccggcaacgagctggtttacgacctttataccggcacgggaaccatcgccaacttcgtgtccggacaagcgcgccaggtcatcggcatcgaatatgtgcccgaagccatcgaggacgccaaggtcaactcggaaatcaacggcatcaggaacacgctgttctttgccggcgacatgaaggacatgctgacgcaggactttatcaacgagtacgggcgtccggatgtaatcatcaccgaccctcctcgtgcgggtatgcaccaggatgtggtggatgttatcctgtttgcagagccgaaacgcattgtgtatgtaagctgcaatcccgccacgcaggcaagggacttacaactgctcgatgccaaataccgggtgaaggccgtccagccggtggacatgttcccgcatacgcatcatgtggaaaacgtagtgctgcttgagttgaaaaatccggcggaaaaagcagaggactgaggcagctcttcgggaacgtgaaagcataaggggctacttcgggaatgtgagtatcactttgggaaatgtaaagggctacttcggaagtgcaaagagctactttgggaacgtaaagggctacttcagaaacgtgaagggctacttcagaaacgtgaagggctacttcagaaacgtgaagtattacttcagaaacgtgaagtattactttgaaaacgtgaagtgctactttgggaaaccgaagcagaagcaaccggaagccacactcccgaaaagcggtacggcatttcggtaagccgatgcaaagctttgttttagaattgaatcattaatcgcaaattattatcctcgtggcaaaagaaagaattatagcaagagcccgcacgcaatatacggactatatggtaaaagagcctatggagctgatggaatttctggcagcgaaaatgccggatgccagccgcaccaagttgaaggcattgttgagcaagcgggttgtatatgtagacagcgtcatcacaacgcagtacaacttcccgctgaagccgggtatgaaagtccagatcagccgtgagaagggacgcaaggagttcaacaacaaattactgaaaatcgtatacgaagatgcttacctcatcgtggtggagaagatgcagggattgctgtccgtcaatacggaaaggcagaaagagcgtaccgcctacaccattctgaacgaatatgtgcagcgttcgggcaggcagcaccgcgtgtacatcgtgcatcgcctggaccgcgacacctcgggactgctgatgtttgccaaagacgaaaagacgcagaatacgctgcgcgacaactggcacaacatcgtaaccgaccgccgctatgtagccgtcgttgcgggtgaaatggaaaacaatgccggcatggtgcgctcatggctcaccgaccgcaagctgtacgtatattccagccccacggacgatggcggcaaggaagcaatcacccactaccgcaccatcaaacgcgccaacggcttctcgctcgtggaactgatgctggagacgggacgcaaaaaccaaatccgcgtgcacatgcaggacctgggacatcccatcattggcgacggacgctacggactggaagagataaatcctatcgggcgactggcgctgcacgccttcaagctgtgcttccgccatcctgtcaccggagagctgatgcagtttgaaacgccgtatccgggagagttcaagaaactgtttctgaaacgtaatggataaaaaagaaaaacggctgtttcatttacgttttgaaacagccgtttttcttttttctattttttattccatcctcagttcaaaatcaaatggagcagcaccatcagacaagtaaaaagttccacgcatccgattaccgtttattcttacatcatccatataagaaattccggctctaccataatccaatacaagatttcgattataatggtcttcccaataccactgaaaatgaaaacgctcgtataaagctccgtcaaacgagtaatattgatactcttcaccaaatccatctccccaaaaagtaaaggtactgaagagaggttcgccgttatccgcattcatcccgacatctcctgtccatgcacgaccgataaagatagattctacatcgtattgatcatctccttcacatgatgcgaaacttaaagcaaatgccattaaaaacaatatattcaaaaactttctcatctttctcatttccaattctgattaaccatatacctggaagcggtcagcatcatgatttcaccgtccagctttccggacaggtaatgctcgcgcacccatacgttctcaaagattttcacatcgcccgaaccgtagttcagtatcagtccctcgcgtgagttgtcaatccatttccaggtaaagtcatgggtatctgttttcgtattgccggtagtggttacgataaaggtctcttttccggaaaggacttccttaccgccctgtttccctttggtgaattccaggatgtgcctgcacgccccttcttccgtgtcgtactcctctacccaactgtcgctgcacagcttctcgtcgctgttttgtatcgtatagtagttatcatccccgcaagaagccagccccgcagtcattacacacaacaacagtatcttcattaagttcaaaatcttcatatttatcgagtttagttaatattttacgggcaaacttacgcaaaaataatgatatgtttaatacctggactggaatttcttatagaagataacgaataagatgaaacccgtcagcgcaaagggcacccctgccaaagccggatagcggtatccgccgccaagagccagaccgcctacgtatgccccgatggcgttgcccaggttgaacgccatctgcacgcaagcaccgcccagcatctcacccccgggggccacgcggataatcagcacctgctccggactggacaccgcaaacaagcccgccgtacagagcgccatcaatatggcggaacaccacggatggggcgaaaggaaaaatatcagcagcagcacaatgcaaatcatgccttgcaccaccatgcccaccctgcccggagtgtatttgtcggaaagccgtccgctcaccagattgcccaccaccatgccaaagcctgccagcatcattaatgccgtgacacttccggcgctgaatcccgacacattcgtcagcaacggcgtgatgtaactataccagcagaacacgccgccattgcccaaagccgtcgcccccaatatcagccagggagcgggagtcttcaggaaacggaactgtcccttgaacccggtatctttcagtccctccaccgcaggaacccaccgccatatataataaaggactatcactccccagcaggccaccagcaagaacgtgacacgccacgagagtatatggctcagggaagtacccagcggaacgccgaacagattggcaaccgtcatgcccgctatcataatggatacggcctcggagcttctcccctcgtccgccagcttgcccgccacaatggaagcgactccgaaatacgccccgtgcggcaaacccgaaatgaaacgcgccgccagcagcgaccagtagccggtggccatcgcagcccccaggtttcctaccagcattaaagccatcaatgccagcaggatatgcttcaacggacgcttgcgcgctaaaatcaacatgggagcaccggcacatacgcccagtgcataggcggaaatgaaatgtccggcaaccggaatgccgatgttcaaatcggcggcaacatagggcaaaatacccatcatcgtaaactcggcaatgcccaatcccaacgtgccgaacgctaatgcaataagactcttcttcattcgaaaaaatacaacctgtgaaacaaactttttaccgccgcaaaagtagtgtattcttcccgcagaagttctttattttataaaaaactaactaaaaatttgtacagcataaatataagatatacttttgcgccccgaaaaagcagggcatgccttgctttttcagcattcaacaataatttaaataatcaaaaggtaaaaagaaatgaaaaaaattgtatttttcttgtttgcaaccatgctggttgcatcggtaaaggcacaggtttatgtaggcggaacggtaggcttatggcacaacgacgacctcgacgccactttcttcaaactggaaccggaagtaggctataacctgagcgagaaatgggcagtaggcggtgtgctggcatttgcacacggcaaggcagacgaaggtaaatacaacgctttcgccctcgctccctatgcacgctactcctactatgaaaataaggtagtacgcctgtttgtggacggcggcttcggcttctccacccagaaggtgaagggcttcgactctgtaaacggctttgaaataggtttcaaaccgggcatcgccattaagctgaacagcaagttcagtgcagttgccaaatgcggtttcctgggctacagagacgattacatgaccggagacaacggctacggatttgccttcaccagcgaagacctctcattcggtttccactacgagttctaatcccggacaaagcatacatcacaagggagcggccgcctcacaaacccggcggctgttcctctccggatacggttactcccgtatataatggggcatctccccgggtatctccatggatatttccaccagtccgcataccacaccctcacgcttccacgcggtctgataaatcattttcctgcccccttttttctctatcgtataggtgtttacgccacccgtctccaggagttcgcgtatcttttcctgcgatttcggactgtggcagtcaaaaagattcctgcctatcaggtttccgtgcccggcaaacgtgcggcatgccttttcgttcatataaaggatgattccctgcgtgtcgcatacggttacggcacagttcatttcatcggcccattcatacatattcattacatttatcctgttgttgagggaaacaaaagtacagattagtttctaattattcaagcattataaatacgtacacccaaattattcgtatttttgcacatcgtttataaaatatgcaatcatgaagaagttcgtaaaaggagtccggtttgctcctaaaaactattccgatgaagtagaagccaagatacagcattataaaagagaaggatacaaattgccgtcacgccatctgctgcgtacggaagagcaactggcaggcatacgcgaaagcgcaaggataaacaccgccctgctcgattacatctcggagaatatccgcgagggaatgtctacggcagagatagaccacatggtatactgctttacgacagaccacgacgccatccccgctcccttcctgtacgaaggctttccgaagagcgtatgtgtcagcatcaacgatgtggtgtgccacggcatccccagcacaaaggaattcctgcgcagcggagatattgtaaacgtagacgtgtccaccatctataaagggtatttctccgacgcatcgcgcatgtatatgattggggaagtcagccccgaaatgcaacgcctggtgcaggtgaccagggagtgccgcgacatcggcatacaggctgcacagccctgggcacggttgggcgatgtgggcgccgccattcaggagcatgccgagaagaacggctacagcgtggtgcgcgacctttgcgggcatggcgtgggtatcaagtttcacgaagagccggacgtggagcacttcggcaaacgcggcacgggcatgctgatagtaccgggcatgacgttcaccatcgagccgatgattaacatgggcagctacgaggtgttcattgacgaagccgacggctggacggtgtgcacggacgacggtctgccttccgcccagtgggaaagcatgattcttatcaccgaagacggaaacgagatactgacacaatagatgcaagacggcaggccgcaagatgtccccccgtgcggtacactccgtaccaacggttggtactccttgtaccacgctttggtattgtctgtaccaaccgttggtattcttcataccaactattggtattccccgtaccgcccgatggtattgccggtaccgcctgccgaaactttatttccttatatgcaattatgaatatcatcctattacccgccgggattatcgcaggagccgttatcggctatctgacggccggcagaaaagccgctgccctgaagacccaggtagaagccgccggagagcgtgaagccctgctgaaccgcaccgccgaagaacgcatcgcccgcgaacgctccattgccgaagaacgtttgcaggaagccgcccgccaggcttcggaacgcctggatgcacaggagcggctgtttgccgaacgcctcgccgaacaggcacgcagtttcaacgaacgccttgcccagcaggaacattccttcggcgagcgcatcgcccagcagcaacggcaatgggaacaacgcctcgccgaacagaaagaagaggccgaagccctgcacaagcgtatgaacaccgagttcgagaacctttcgaaccgcatcttccaaagcaagaccgaggatttcaccagactgaacgccgagcatctgggcaacctgctgcgcccgctcgacgagaagattaaggacttcaaggaaaaagtagagcaggtgtacagcaccgaagccaaagagcgcttctcgctgggcgaacgcatcaaggagctggtggaactgaacaaccgcctcagcgaggatgccaacaacctgacccgtgccctgaagggcgactccaagatgcagggcaactggggcgaaatgattctggaacgcctcttgcaggcatccggcctgattgagggcgagcactatttccgccaggagttcctgaaagacgagcgcggcgaagcgattgtcagcgaagagagcggacagaagatgcagcccgacatcctcatcaggtatcccgacgagcgcgagatgataatcgactccaaagtctccctcaccgcctacgccgcctacacctccgccgaagaccgcgacgagcaggcgcgctggctcaaggcgcacttgcagtccatccgcaaccacatcgacgagctcagccggaaggactattcgcactacgatatcaaggcgccggacttcgtcatgatgttcatccccacggagggcgcatacctgctcgccatccagagcgacgccaacctctgggagtatgcctacaacaagaaggtggtactgatgagccccaccaacctcatcagcgccctgcgcctctcgctcgacctgtggaagcgggaaaaccaggtgaaaaacgtgcaggccatcatcaagcgcggcactgccctatacgaaaagattgtaggctttaccgacaccttcctcaccctcggcgaccgcatggcaaccttgcagaaggactacgacaaagccctcaaccagctctccgaaggcaacggcagcgtagtgcgccaggctgaaatgctgaaggacatgagcctcaccccgaagaagcgcatctcggcaaggctgctgcccaaagaggagatacaggaagatgctgaacaagaagaaaataaataactcttaagacaagacttgatacattatgaaaactttaaaagaccgtattctcaaagacggaaaatgctatccgggaggcatactgaaagtggataactttatcaatcaccagatggacccgatactgatgaaatccatcggcgtggagtttgtaagacgtttcgcctctaccagtatcaacaagattatcaccgtcgaagccagcggcatcgctcccgccatcatggtgggctatctgctggagctgcccgtagtgtttgccaagaagaagaaaccgagcacgatggaaaatatgctggttacttccgtgtattcgttcaccaagcaacgctcgtacgacgtatgcgtcagcaaggatttcctcgcgcccggcgaccaggtacttttcatcgacgacttccttgccaacggaaacgctgccaaaggcatcatggacctggtgaagcaggctggcgcggaactggtgggcatgggattcatcatagagaaagccttccagcacggtggtgacgagctgcgcagccagggcattcatgtagaatcgcttgccatcatcgaaagccttgacaactgtgaaatcaaaatcagataacccggagcgatggaaaaacaacagggaaacggactgatttacggcttgaacgacaagccgccttttaaggaagctttcttcgctgcgctgcaacatctgcttgccatattcgtagccatcatcaccccgccgctcatcattgcgggcgcattgaagctcgatgcggaaaccaccggctacctggtttcgatggcgctgttcgcatccggcatatccacgtttatccaatgccgcaggttcggcggactgggcacggggctgctctgcatccagggaaccagcttttcgttcataggtcccatcatctctgccggaatgctgggcgggcttcctctgattttcggttcctgcatggcggcttcaagcgtggagatgctgataagccgggtgttgaaatacacaaagaagattatcacgccgctgatatccggcatcgtagtcaccctcatcggaatgagcctgataaaggtaggaatcacagcctgcggcggcggagccacggcacaggcggacggcagcttcggcagtttccgccatgtgggccttgcggcggcggtactgctgcttatcatcgccttcaaccggagttccaaccgctacctgcgcatgagttccatcgtcatcggactggtgataggctacatcgcagcctggttcatgggcatcatcgacttctcctcgatacaaagctacggcggctttaacctgccgatgcctttccgctacggactggacttcgacctgtccaccatcatcgccctggggcttattttcatgattaccgccatcgaggcatacggtgacatcaccgccaactcccttatctccggcgaaccggtggaaggggacaccttcgtaaagcgtgcttcgggcggtatccttgccgacggcttcaactccatgctggcgggtgcgctcaactccttccccaactccgtctttgcgcagaacaacggaatgatacaactgaccggggttgccagccggtatgtgggctattacattgcagcctttcttgtgctgctcggcctgttccctgccgtgggactggtgttttcactgatgcccgaacccgtattgggcggcgctactctgctgatgttcggtacggtggcggcggcaggcatccgcatcattgcagcgcaggaaatcaaccggaaggctacccttgtcatggctgtcagtttctcactcggcctcagtgtggagctggttcccgaaatactgtgccaactgccggaaacgctgcggaacatcttcgcatccggcatcacaacgggcgggataacggctattctggcaaatctgctgattcatatcaaggagtaatattattctatttcaggcacggattacacggatttcatggaaatattgtccgaaagaacaaagtaaatccgtgaaatccgtgtaatccgtattaatccctctccggcagcacccaattcagcaccacataccccagcaccccggcaagcaccgtccctacaagcaccccaaatttcgcctggttcagcagttccggatattcgtccgcaaaggaaaggttggcaatgaacaacgatacggtaaacccgataccgcccagcagggagacgcccgctatattcttccagttcatccccgccggcatcagcgctacgccgctcttcaccgccagccacgtaaacaggtatatccccaggaacttgcccagcagcaagccagccgccacagcgatgctcacatctcccacgatgctgccgctaccgctgaacaccacaccggcattggcaaaggcaaacagcggcagtatcacgaagctcaccgccccgtgcaggttatcttccagcgactgcaacgggctgataacataatccgatgcccgctccacctgcttcaacgtggcaatctgcgcattggtcagcacgatattatccgacttggaaaccgggaactccccgatgatgtcgcgaatccgctcgatgtatttgcccgcatccaagcgcggacgcgccggtatcacaaacgccagtatcacgcccgaaatcgtactgtgtatgcccgattgcaggaacaggtaccagataatcacaccgaagaagaggaagaatatcttctgcgttacgccgaacttacccatatagtagaggaacacgtacaggacagccgccgcaatcaggtatccgtatgccacgtcagcgctatagaacaatgcgatgaccagtatgccgccgatgtcgtccaccacggcaaatgctgtcaggaatattttcaggctcaacggcacacgcttgcccagcaaactgagcacacccaatgagaaggcaatgtccgtggccatcggtatagccatcccccgggtttcgggagtgccggaagcaaccgacaacgcatagatgacaaccggaaccaccatccccccgcatgccgcaataaaaggcaaagccgctttccgcacagaggacagttcccccaccagcaattcgcgctttatctccaggcccactgccagaaagaaaacagtcatcaggcagtcgttaatgaattctatcatcttcagcggatgcccgccgtgcgaaaacagattgaagttgccgatgcgcagatgcagctcctgaagcaggaaatcctggtatacgggcgacagggacgagttggcaaccacagcggccaggatagccgccagaaacaaaagcacgctcgctgctatgttcagcgacgaaatgttttttacggtacgtaggataatcataagtgtttttaattgaaggattcgttcattttcggaaaaagacaaaaaagggggcagccctatcatgaaagaacaacccccgaaagatatgattggttcggcagcaaaccgctaatccagtttcagcaccgccaggaatgctttctgcggcacttccacattaccgatttgcttcattctcttcttaccccgtttctgcttctcgagcaacttgcgcttacggctcacgtcgccgccgtagcacttggccgtaacgtccttgcgtacagccttgattgtttcgcgggagataatcttggcgccgatggccgcctggatggcgatgtcgaactgctgtctcggaatcaggtccttcagcttctcgcacatgcggcgtcccagctcgtatgcgttgtcaaagtgtgtcagggtggaaagggcatccaccggttcgccgttcaggagaatatccagtttcaccagcttggacggacggaagccgttggcatggtagtcgaaagaggcgtatcccttggagatgcttttcagcttgtcgtagaagtcgatgacgatttcgcccagcggcatgtcatagtatatctccacgcgattgccggaaatgtattcctgcttcaccagttcgccgcgcttgcccaggcagagcgtcatgatggggccgatatagtccgtggcggtaatcaccgaggcgcggatataaggctcttcgatgcggtctatcagggtggggtcgggcatgctgccggggttgtgcacctcggtcatgtgcccctgcttgtcgtagatgttgtacgacacgttcggcacggtggtaatcacgttcatatcgaattcgcggtccaggcgttcctgcacaatctccatgtggagcagtcctaagaatccgcaacggaaaccgaagcccagcgccagtgacgattcgggctggaaggtcagcgaggcgtcgttcaactgcaacttctccagcgaagagcgcagatcctcgaagtcttccgcctcaatgggatatacgccggcaaagaccatcggcttcacttcctcgaagccggcaatcgcttccttgcacggacgggctatgtgcgtaatcgtgtcgcccaccttcacttccctggaagtcttgatacccgaaatgatataccccacgtcgcccgtacgcagctcctgacggggaaccatgtccatcttcagcacgccgatttcgtccgcatcgtattccttgcccgtattgaagaacttcactttgtctcctttgcgaatcacgccgttcacaatcttgaagtaggcgatgatgccccggaacgagttgaatacggagtcgaaaatcagtgcctgcaaaggcgcttcctcatcgccttcgggatgcgggatgcgctcgactaccgcctcaaggatttcctccacgcccatgcccgtcttgccggaggcgcggataatctcttcgcgcttgcagccgagcagttccacgatttcatcctccacctcttcgggcatggcgcttgccatgtcgcatttgttgataacgggaataatctccaaatcgtgctcgatggccatgtaaaggttggagatggtctgcgcctgcacgccctgcgaagcatccacaatgagcagtgcgccctcgcaggcggcgatggagcgcgacacctcgtaggagaagtccacgtgtcccggagtgtcaatcaggttcaggatatacttctcgcccttgtacacatactccatctggatggcatggctcttgatggtgatacctctctccttttccaaatccatatcatccagcatctgtccttcggttacttggatggtattggtgaactccaacaggcggtcggccaaagtagatttgccatgatcgatatgggctatgatacaaaagttacgtatattctttttcattcgtttctaaagtttttggagtgcaaagatagtgtatcttgaacaaagatacgaaaaggagcgcacaaaaaaaatgcgttgataacatatccaatgtatcaacgcattttttataacattccaatcactttcttagttcagcttcacaaacagttcgccttcaacttcttgagtagagattttgtcctctctcaataaccatccaagacccaggaacaaatctttatccaccaattttgtagcttttttgatttgttttgcggttaaaccttcggtttcattcagtgcattccaaatttttcctgcgatttcaccggctttttcttttaacattttctctttgtttttagttagacatgcttgaaaatccgtttcccccgacggagaagaccgattttatttcggcggcaaagatagttatttttatgttatatagcacgttaactctcatttttttccattttcagccggagaaacggcacgatttgccctatttccgctgtttttccagatactccgcccatattgccgccgcctcttccaccattttggcgcagggacgcttggcgtaatactgctccgtgcgggcttcgggggtggaagagccttcgggcttcttcagtcccaacagttcggcgcaaatcatcgagccgttgcgtttcctgaattcctccgcaagctgctgcaccagcgcatagttggcggctttgccctcacgatccttgccgtctacggcacctttctccagtcccgccagcaggaacatgccgcaggcggcgccgcacgtctggcgcatccgtccgatgccgccgccaaacgaggcggacatgcgcaacgcctgttcctgcgtaaaaccatacatatctgcaaaggcagccacgacggactgcgaacaattatagccgctcttgaacagttcaacggctttttccactctgtctttcatcgtcatatcttaatctgttaattccaacatcatggggcaatgatccgaatgtacggcatcgttcaggatacgcgcctctttcagcatcggacgcaccgcctcgcttgccatgcaatagtcgatacgccagcctttgttcttcgcccgcgagttgaagcggtagctccaccaggtgtactcccggctgtcggggtgcaacaggcggaaggtatcgatgaagccctcgttcaggaagcgggtcatccactccctctcttcgggcaggaagccgctgttggtggcattgcgcaccgggtcgtgaatgtctatcgcctcgtggcagatgttatagtccccgcacaacaccagtttgggacgggtgcgcagcagttccaccgcatagcgccggaagtgttccagccactccatcttaaaggcctggcgctcgtcgccactcgttcccgaagggtgatagacactcaccacggacaggtcgccgtaatcggcacggacaaaccgtccttcgctatcgtactcctccatgcccatgccgtattccacataatccggctcgcgtttcgtcaggatggcgactccgctataccctttcttccgagctgaatgcagataatgcctgtatcccaatgcatccaacgcctccgcaggatactgctccggctgcaatttggtttcctgcaggcacagcacgtccggctgttcctttgccagccattcgggaagccctttggacacggcggcccgcaaaccgtttacgttgtaggttataatcttcatatccgtatatattttttttaattatccgcccggcagcaatcgtttgtcaggttgcaatcgttcgtccgcttgcaatcattcgtcaggttgcaatcattcatccggcaagcagcgttcattacaaactcgatatcagcagcataatattcaataccgtcacgatggcagcaatcgtatagagcacgaatgtgctccatttgctgttcacatactgccccatcactttgcgggacgaggtgaggctcacctgcaggaacaccgtaaacggcaactggatgctcagtatcatctgcgaaatcagcagtcccttgaacgggtcgccgataaaacaaatcaacagcagcgcgatgcccaacgaaaggattacccccacctgcgagtggctgtccctgatgtggtaggactcgccgaagataccggcaaagatggaacctgccgccatgccgctcgtaatcgtcgaggagatgcccgccatcagcaatgccagcgcaaacaccacgccggcgctgctacccagcaacgggtccaacagcgacttcgcctgctgcaactcctccacctgaatccctcccttgaagaaagtggcggcggccagcagaatcatcgcactgttaatggcccatcccacaatcatggagaagagcgtgtcgaacaattcgtacttcagcaccctgcggatagaggcatcgtcctgcttgttgtactcgtggctctgtatcacctccgaatggagaaacaggttatggggcatcaccacggctccgagcacactcatgataatgagcatgcttccctgggggaacgaaggagtcacccacccctgcaccgccacaggccagtctatcctgacaaggaaaagctcgtagatgaacgaaagccctatgacggacacgaaggcgataatggccctttcaatcttcttgtaggagttggtgaaaagcattatggacacgaaaaccgtagtcagcaccgaaccccatattatggggatgtccagcaacatttgcagtgcgatggccccgcccaatatttcggcaagggaagtggatatggaagccagcaccgccgtacccaatatagggcgcgacacccatttgggagtgtactgcgtggcggcttccgacaggcacagtcccgtcacgatgcccaggtgcgccacgttgtgctgcaggattatcagcatgacggtagagagcgtcaccacccacagcagcgagtagccgaactccgaccccgccgcaaaattcgacgcccagtttccggggtcgatgaaacctaccgtcaccagcagtcccggtccgatatatctgaacacgtccagaccacccaaatagcgtttgtggtctttccgttgcaagtctttaaaaatattcttcattattatgttgttcttgttttgaggatgtaaaagtactcaaataaaaaacaaatgcaccataagttggttcaaaatggcagacacgttgccttgccaacccaaaaaatcatcccacgagacggataaattcatcccgcaagacaaatttatccacctcgtgggatgaatatacccgtacggaaaacacagttcttcctgatttcctttccgtgaagtccgtgaagttcacaaggtctccgaaagagagtggttgaaatacacttgacgatttcttttaggcacggattacgcggatttcacggattttcttaattctttttttatcaaaatccgtgaaatccgcgtaatccgtgcctaaaaaatcatcacgcccccttacatcttcaatcagagcagcagaatcaataccccatctcgtgcaatgccttacacaactggtcgggacaggaagtgggacgtccgccgcagcggataccttccaggcgtgaaatcacctctttcaccggcatcccggcaaccaggcgcgacaacccttgcagattgccgttgcatccgccccagaacgcgatgttccgcacgatgccgtcttccacctcaagctcgatattggtactgcacgtgcctttggtcttgtaagtatacgtcattactcttcgctttcttccggcttcatattggtgtacaccgtctgcacgtcgtcaaactcttccaggcgttccaccatcttgtcgatggtctcgcggtgtgcaggctccacatctttcaggtcgttggcgatgtaggtaaactcgccgcccacatcctcaaaaccgccctcttccaggtgcttctggatggctgcgtagctcttcgggtcaccgtagatggtgatagtgccttcttcttcgtcctcttcatagtcttcgtcgatgtcgaaatcgatcatgtcgaggatgaattcttccatatccatgccgtctttcttcttgaaagtgaacacgcatttgtggtcgaacaggaaagccagtgagcccattgtgcccaggtttccgccaaacttgttgaacacgctgcgcacatcggccaccgtgcgggtggggttatcggtcagtgtatccacgaatacggccacaccgtgaggtccgtatccctcgtaggtcatgctcttgtagtcgctctgatccttgcccattgcattcttgatggcacgctcgatgttgtccttcggcatgttctcgcgcttgcaggtagcaataaccgaacgcagtgcagggttgttttccggttcgggtccgccggctttcaccgcaatagcaatttgtttacccagtcttgtaaaggtcttagccatgtgaccccatcttttcaatttggcagcttttctatattcaaacgctcttcccattggattgtatattttaatttgttctttaattggtttctgtctttactgccgcgtcagtttccgatacttccaatatgacacgccgcacatcagcaggcatatcagaccgctcacccctgccagggcatttctccagccctcgttctcagggaagtgccaaagcacccttactgcctggaacaagaggagcagccctatggtcaggcccgtcagacacgctcttttggctctgatatggtggtccggttttatatcatacttcttcatagcgggccagcttgtttttaccgcagcacggctcccagtcggttctgcaggttggcaatcagcttctgcatcactttgtcaatctgcttgtcgttcagtgtggcattctcgtcctgcaacaggaaacttacggcatacgatttcttaccggcttccaggttcttgccttcatagacgtcgaagagggagacttctttcagcagcttcttctccgtttcgtaggcaatcttttcgatttcggcaaactgcaccttcttgtcaatcagcaaagcgaggtcgcgcttcacggccgggaatttggagatttcggtatagtttaccttcacgttcctgatggccttcatcagttctttccagttcaggtcggcatagtacacctcgttgtcgatgtcgaacgctttcaggagcttccttgtcaccacgccgaacgtggcaaggcgcttgcccccccttgtctgcacggacagggcagcggcgtaaatatcgtccgtaaggttgcccactaccaggtcgtgcatctgcaagcccagacgggcaaatatgttttctacatacgctttcagctcgtacaccgaactgtcctcgtcctgatgcgcccatgagttggacactctcttgccggtaatccacaggcccaggtgatagtcttcggaataaggagcgagcgccttttcggggttacgcttctcttcgttgaagtaatagcagttgccgaactcaaagaatttcaaatcggcattcttgcggttggcattgtgcgcgatgctctccagtccgccgaaaagcagtgtctggcgcatggcgttcaggtcggcgctgagcgggttcatcagcatcacgaggttcttggcggaataagattccagtccgtcgtaataggcggcgcgtgtcagcgagttgttcaggatttcgttgaaaccgcagcccaccagttgctcggcaaccaggttctgcagacggttggacttgtcgcactcgcccttcgttgtcaggctggacttcaaggctgtgggaatctccacattattatatccgtaaatacggaggatgtcctctatcacatcgcagtcgcgctgcacatccacgcggtatggcggcacgtcgagcgtcaggccctctgccgtttcgcctacaatcttcatctccaggctcgtcacgatgctttttatcgtctctgccggaatctccttgcctatcagcgcgtgtaccttcccgtaagagagttccacccggaagtcgcgggcgggagcggcgcatacatccttgatgtcggaagagatggtgccgccggcaagttccttcaccatcagtgccgccagtttcaggcagtaaagggtggcgttggggtcgacgcctctttcaaagcggaaggaagcatccgtattcaggccgtggcggcgggcggtcttacgcacccaggtggggtgaaaataagcgctttcgaggaagacgtccttcgtggtttcggtggagcctgaatccagtccgccgaacactccggcgatgcacatgggctcttcccggttgcaaatcatcaggtcgcgtccgttgagcttgcgttccacgccgtccagggtagtgaagggagtgccttcgggcagggtctttacaatgacctcgccgcccttaatcctgtccgcatcgaagcagtggagcggctggccgaatgcgtggacgatgtagttcgtgatgtccaccacattattaatagggcgcaggccgatgatgcggagcttgttctgcaaccattcggggctttcctttacggtgacgcctttcacggtgacgccggcatagtgcgggcaggcttcgctgttctctaccgtcacccggatgtcgaggtcgtggttatcgacggcaaaagcctccacagagggcttcttcaaggcggcgggcttgccgttctgcaccaggtaggcgtacaggtcgcgcgccacgccgtagtgcgagcaggcgtcggcgcggttgggcgtgatgtccacctccagcacgtagtcgctcttgatgttgtaatagtccttggcaagcgtgcccggcactgccgtttcgggcagtacgatgatgcccgcatggtctgtgccgatgcctatttcgtcttcggcacaaatcatgccgttggactctacgccgcggagtttggatttcttgattgtgaagcattcatcaccgtcataaagttttgtacccaaagtggccaccaccactttctgtccggctgccacgttggctgcgccgcatactatctgcacaggttctccctgtcccaggtttacggtagtgatgtgcatgtggtccgagttgggatggggctcgcacgtcagcacttcgccgatgaccaggccttccagtccgcctttaacggtttgcacctcttccacgcttcccgtttccaatcctatggaagtgagcgcggcggctacttcatccggtgtcaggtcgaaatccacatactctttcaaccagttataagagatattcatatcattatttttttattgtttccaaaagtgactcgcaaagttaataagattttcctgtagaaagggaaaaatttcaggaaatcttcgagagtatatgcgcttttacctgttgccatgactgatttacaaacatatccggcatggggtctgcctccgcatcgtcaaaatggtcagcgaagctatccccgctattgattcccgcaaatattcagcctcacaatctaccgtaccgaaaaaatccaaatcaatagatttgcgatgccccaattgcaaagcgagcgcagtgccccctaccaaccttgtttgctcaagcaccggcaaccgttgcagttttttcaggagttccagggttgaggattcaactgtttccaggtatagcatctgaactgttctttaggggtttttgaaatagcggcaatgtatgccagcgcacggggttccaagctcctcaatccctttgcggtctctacgattttgggcaatccgtagtatgacttaatgagattccagtcgcccagcaaaccatattccagcactctctgtatcacatattgcgcatgtgcgtcgaggtcgatatcctctttgcgcacatcccagaacagatgcggagagaattgttccatatattcatttgcagacatagcctttacttcttttatttacaaaggtagcattctttttccgaaaatcaaccgattaatcatttataaaaagcctgcgggtcaaagtttatctactatccggtgcgcccgtctccgcagcaattcgaactcttcatcgtccaggatggctttcattgccttataccagcgtatgagcacgctgattttcacatccccccttttaaaagggtctgaatggtggtattactcatgccggcatggtcggcaatcattttcaaagacacgccggatgccttcaacagatagcggagctcttcacctatcataagatagggatattgcccgtcctcattttttacactcattttagtattaattttatttaaaacacaagggaaatatttaggtttattaagtttcgtacatacatgtgtgtacggtcatctgttttataatcacgaactttgaagggtatccctggaagattcgggaattgcgatgcaaaattaacaaattaataatcagcaccaaaaaaacaagtaaacaaatgaatgaattcaaaatgtccctgttcctcgcccccatttcgccggtgaaggacggcggcacggggcaaatcatcaaacctgccaccctgaaaccctacaaaaccatgaccctgcaggaagtgtaccggacgataaccgccaacacacgcctgcaactgctcaccgaccgcgtgcgccgggcattcgacagcggcgacctatccgcctaccgcgccctcaaacaggagcttctgccctacgtcaccccctgcggcacgttcggccgccggcgcagcgacagccttctcgaagcatcgggtcttgtagtggtggacatcgaccacctcgactccgctgacgaagccgcccggctgcgccgccaactgtttgaagacccgtttcttaggccggagctggtcttcatcagcccctgcggacagggcgtaaaagccttcgtgccctacacccccgaccccgccctgccggatgtgcgccagaatgccgccgaaagtatccgatgggccatggactacgtgcagtgcgtgtatgccgacggtaaccgcaactccgccaaaggcgtggatacttccggcaaggacctcgtacgggcctgcttcctgagctacgaccccggtgcgctcatcgctacccggaataatctttcgccggaaaataatctgctacaaaaccagtaattcataactcataatttataacagataatttataacagataatttatagtgcataattcgtaactcataacaggtaactcataacacataattcgtaactcataacagataactcatagcacataattcataactcataacagataactcatagcacataattcataacagataactcataatttataaccccatgaccaatatcctatccgatttgcgccgcctcacggaagcggttcacgcagcgggcgccgacatcgcgcccacctacagagagtatgtacaactggcattcgccatagccaccgactgcggcgaagccggacgcagcgacttcctgatgctgtgcagcctctctgccaaatacgatgtgcacgcggcaaacaagctcttcagcaacgccctgaaaacaaacaacaacagcgtccacataggcaccgccttccaccttgccgaactgtgcaacgtgcgcccccgccccgcagagaagccgcggcaggacgctcccgcgggtacacttggtacgccgggtgcaccgcatcccgccgcctcacacacgcatgcgcacggttattataatagagcggagatgcctgcggaagaatttccggaagcgcccgctgccagtcttcccgccgaagcagccgatgccggaacagcaaactccggaacaacctaccccgggacaacctaccccgaagcagccgaccccgaagcagccgacgaggagacctgccggggcagcgaacccctcaccccgctgccctgcttcgacaaccggacgctctggcccgcaccgctgaacgaaattaccgcccacggcaccacccgcgcccaacaggacatcatgctgctgggcgccgtcaccgtgctgggcgccagcatgaacagccacgtgcgctgcgcctacggcggcaagatgatatcgcccagcctgcaaacgttcatcgtggccctgcctgcctcgggcaagggcgtgctctccctcgtccgcctgctggtggagcctatccacgacgagatacgcctgcacacggcagaagccatgaagcagtaccgcaaggagaagggcgcctacgactcgctgggcaaggagcgctcgcaggccaccccgcccgcactgccgcccgaccgcatgttcctcatctcgggcaacaacaccggcacgggcatcctgcagaatatcatggactccgaaggcatcggcctgatatgcgaaagcgaagccgacaccatctccaccgccatcggctcggaacacggccactggagcgacaccatgcgcaaggccttcgaccacgaccgcctctcctacaaccgccgcaccgaccgcgagtaccgcgaagtgaagcgcagctacctctccgtcctgctctcgggcactcccgcccaggtgaaaccgctcatccccaccgccgaaaacggcctgttctcgcgccagctcttctactacatgcccgccatccacaagtggcagaaccagttcgaccggcaggataccgacctcgaaaccgtattcaccggcctgggcatgcagtggcgcgagcaactgaaacgcatcaccgccggcggcctcttcaccctgcgcctcacccccgaacagaaggagctgttcaacaacctcttcgccaacctcttcatccgctcccaccttgccaacggcagcgaaatggcgagcagcgtagcccgccttgccatcaacatctgccgcatcatgcaggtagtggccatgctccgcgtactcgaatcggacgacatagcccgctcgccccacctcacccccgacaaggacatctccggcgacaacctcaaggacggcatcatcacccgctgggacatgaccatcctcccctccgacttcaactccgtactggagcttaccgaaagcctctaccgccacgccacgcacatcctctccttcctgcccggaaccgaaatcagccgccggagcaacgccgaccgcgacgccctgctgcaaagcatggaaagggagtttacccgctccgccttcctgctgcaggccgaagcaacgggcattaaacccggaacggcatccacatggctcaaacgcctggtgaagcatgggatgatagagagcgtggacggaaaggggacgtaccggaaacctctcccaaatggggtgtgacaggttttttgtctgtggttgttttgacatgttttctgtatatatactatacgtgcgtgtgtgcgaagccggcggcgggggtgattgttgtgtaccaattgtgacacttggaacggaggggaggtagaggcagaagaataaaagaataaaagaataaaagaataaaagaataaaagaataaaagaataaaagaataaaagaacaaaaggaaaagggcaaaaggactccgggaaaaatgttcgtgaacttcttcctgatgtttggaagttggagaagtctaatacgaatacaattggagtttaaatatttatgttgaagaaacaaggagggtgtgccaaaactaacattcgcttgctatttgtttctttttaggcacggattacacggaaaacacagattttctttgttcttttttccgtgaaatccgcgaaatccgtgcctaaaagaaatcatcaaatgtattttgacacactctcttttctatttatgaaaaagacaatgtgtactttatcggatgcttacgataaaagaacagaagaatggaaaagggaggtgtttcggataagagggtctttggggcaagaaaggattccggacaagaaaggattccgggcaagaaaggacttcagtcaagaaggatggaaagtaaggtggtgttgccggaaacggccggtaacattactgaagataaaaaagaatgaaagattacttcatgttttcccgggggctactccggcagcgtagcgtagaactttagcgttgcagagtagaactttggcggcgtaaagtagaactttagcaacgtggagtagccctttggcaacgcaaagcatccttgagtggacagaggaggattcaggctatgaaaagcgtttttttctgttgtagatgcgggtggtatgtgtcggactgccggagggaggtcagttctcgcccggttctcccagcgccccgacaatcagccctacctgtgcgggcgtgtatgtcctcgattttggcgaaagtcctgaggcaagcagttcttcccgcaggttcggatagaggtctatccattggttcagtttacggaaagccgcttgcgggcacaactccggacagtaaagctgtgcaagttccgtgcgtccgaatgtgcgtattttaaaattcgtcataatccctgattctttggttcttacagagcaaagatacggaaatatctccacacttccgcatctatatccgtatataacaacctacaacagaccataacgtaccgaaagtgacaaaccctcttcccgcgcatcgtatcttcgtaacgtgatcacaaagagagttgaaaacaagaattaaaaacccaaaaacttaaagattatgattcgttacaagaagtatcaaatgaccggtgaaaaccaccccctgaaaggcttatggtatgcccgtcccctgattgaggacacgttcgacaccgagaagctcgccaagcacatgtcaaaccacaacacgccctactctgccggcttaatcaaaggcgtgcttaccgacatgatagcctgcaccaaagagcttatcctggacgggaagaacgtgaaactggacgacctcgccattttctccgtcggcatcgtcagccgtaaaggcgctgcctctgccgacgccttcaccctggcggacaacgtaaagggcctgaagctccgcgcccgcgccacgggtgagctgagcaatgcccaaatcaacctggaaggccagctgaaagaagcgtccaagtacagcccggacaacagcggcgcgggtggcagcacccccggcggcggcaatggcgaagaggagaatccgttaggataacagaagcaacagattatcaacattaacaccagaagaacatgagcacaaaatcaaaatccgtatggggcattgtcctcaaaaccatcgtagcagtagccactgccctggcaggggtattcggtttcagttcctgcataggccgatgagaatcatcacgcttgccatcattcactgctcggccacgccccagggcgtgcgcctgagctttgacgactgccgccgcgagcacatccgccgcggcttcagcgacatcggctaccacttctacatcacgcgcaacggagagattcaccgcggccgcccgctggagaaaatcggcgcccattgccaaaaccacaaccggcactccataggcatctgctacgaaggcggcctggacatccgcggcacacccgccgacacccgcacaccggcacagcgggcatcgttagtggcactgctgcgcgaactgaaacggatttttccgaaaattctggtagtgggacatcatgacctgaatccgatgaaggaatgcccttgctttaatgcggtggcggaatatggggggctgcccaaactgaaatgagtgctccgaaaagttacggattgtagctataacaacatgaaagggtcgtatcaaactccgtttggggagtgatgatacgaccctttcttgaatattttttgagtctttcttgaatactttttgaatctatttcagctctcctcaaaaactacttccatcccattctcccggccaacaaaccatacacttccccgttcggaatcatctgccccttttcacgggccgtttgcgtatattttatggcgtccacaagaatatcatcattcaaatagcctgcatattccgccaccgtagagtatttcattgccattggttcggctacataatcttccgatacttcttgttttttataggttttcgcttcactcatggctctgtgtgttttttcgcaaagatacggttattattcagataaacaagcctatacgtttttcttttctatttcttttgcgacaaagcatccagacattctttgtttctcagtattctttttttatcaaatacccatccccacttattaaaatattgaatagcagagcaaatatgatatttcaataatttccaacttttataagagcctttttcatatccatgatacacagatgccataggatagaacattgttttagacacctctcctattctacggcataaatcaacatcctcagaatacataaaaaaacgttcatcaaaaccacctaccttttttaaaacatctactcgcataaacatgaagcatccggacagcaccggaatctccattattttgtcataccccatagcatgcaattcatatttataagcacgtttctccttatatttctttataggaataaaacgtctcccaaacaaatccattggagaaggcaacaacttacatagatactggatgttaccgtctgaataaaggattttgggcataacctgccccacatcggggttatgattcatgtattcacaaattttcgtgacagcatcagccttaaactttatatcaggatttaaaacaatatgataacaagcatttttccttatagcttcgcgaatggcgatgttatgccctgcaccgtatcccagattccggtcgttaaagacataaaaaactctctttttatcaaattttgcgacaaaactttccagttccctattaggggagttatctatcagatagagaaaggaaatacagctatccaatacactggaaacaaccgtattcaattcatcttttgctgtcttataaagaacaatagaggaagttatcattagttttcagaatataaatgtatttgttattttaaatttaaaagtaatctttgcattgtaacgtacagatgtagcatataaaaacggcgttttctcaataaatataaaaagcaacgttttcttaatggtaaaagctttatatatttattttcataccactgaggtatttttctttcaaaactgcatataatgtccttaacaactttttcatttactcctgcatctattgccttaaatacagcaccgtataaaaccaaatgaatacctctatatgttttttcttcttcaaactcaaccgaaacattttcatatatgaaagtaaaagcatctacaaaaccttgataaatacgtgtgttttgagaagtggaaagagactgttcacgatatagataattataaaacggagtaggaatatatgtaactttatgtgataaagatattaataatggaacggctgctgcatcctccgagttatataacgagggtaacttgattttctttataatgtccgattttacgacaagtgcacacaaagaatcaaaagctatagctacataatctttaatggaacgcgcttcatccaaaaagcgggtacactgtatatgcttctttttaccacttttataattccgataaaagtcgaaaaaaatcatatcataatcatctgttgacagcttttgataaatattctccaaaaagcatttttcataccagtcgtcactatccataaatgttacgtatgctcctttagcggcaagaactcccgcttctcttgccttacccggaccaccattcttctccattcgtatcaaatgagtatttaatttggtctgttcacaaaaggtccgcaaaaaatcataagtattgtctgtggaacaatcgtcaataaaaataacctcaaagtctgcaaatatttgcttttccaatgaagcaaggcaacgctgcatcaaattggaagagttatagcaagggattataacggaaaaaaaaggatgcattttaataaatctttaatgaataagtaattgtccgaaaatagtctggtatgggtacacattcaatatatttcgttcaaagaagaaaacagacaataaaaataatgaaaagaccaccagtttcctatatttcgaatccaactgatacaaagctgccatattgaacaaagccacaaagaggaataaagtatttaaacgtccgaagatctgtacctttatagtcagaatattgacaattacataaactaaatttaataatataagatacagatttttaggattctgttccaatagtttctttctgaaaaagaatataacaaaaggtattgacagtcgaattaggactcccaagccactgcctatttcaacctccgaattccagtctgtattcatataacctccgtaacggggtatcaatagcattgcaactgtgaaaatcacattaataaagttaaatttaacaacaagtatataaaaaataaatatcagtccatagatataaatcggcttgcctagtttgaatttcttaaaaggataagtgagtaatgcaaataacgcagagaaatgaaataacaaggatgagataccgtataaatatgtcttaagtttattgtctgaatataaataataatataacgcacatattaagaatgttacagccaaaaattgacgaacaaaagataaactatcaatatatacatacagagtataaaaagaacttattagaaaaaagctttttctcccaatacaaaaagatataggaaaatacattacgaaagaggtcaatataaaaatccattgtgtctctaaatcaagataacgggccgaattttgcaacaacaaaaaacctggttcatcaatataggcatcaaccaaattattgtatatttctgaataattcccataatcataaccaacctcgtatcttattgcagcaggaacaaataaagtaaagaaaaataaccaacgagccaatatgcgatgactcctattgttgctgaattctgcaatatatccacaagcaatagaatttaataatatgatattataaatcaaaaatgaaaacattttctataaagagcaatcgtattgaccgatatttttttaattactatattttgatttcagaactttttgaacccaaacaggaaaagctttataaaaccacagatatatatggatataaaaataatggcaggtatcccatccgaaaattctatcaatgcttttcctgtcagaaacagtcaggctattgtcttttagaattcttcctatcgaaacacttgtcccgacaatggccaaatatcctatgtttttttgagtcttcctacgaagttttttactactcaattttaacaagtcctccgctataaacaatatatcatgaaatttcttcaacgtatattccgaacgaataatagagccttgcctcaagtagtaattataaatacagatgtttttataatatatagcattagcatgcaataacattttaggcatccaatttacatcttcaaaaaaaataccttttgtaaaaaaaaggttattatccagcagaaaactctttttataaataccttgtacaaccaaaatattgatagattttacgtaataccggttaaaataatcttcaccggtataaacacgactttgctcctcgattatagcaggtagataatgcctgttttcgccctctacaatattagaataattgcctacaagaacatctggaagagaattgtacccactacgaaaaagagtaaccaaattctcagctttaatagtatcatcactatccaaaaaataaacatattctccacaagcgtgccgtaaaccgacatttcttgcttcacccaggccttgattatcttggtttataatctttatgtgaggatatttttttgcatagtcttctactatagccatacttccatcaggcgttccatcattgactattattacctcacaagctaaacccaagccaaaaattttagaaacactatccaaacatcggcctatatatgcctctacattgtatataggaatgacaatagataattccattgaatatttaattatatattatacacttagccgatatttcttcttgagaataccaagttagattgggagagtctgttacataattaaaattaggatctggagtcatatagccttcaccataattagccttcaagtactcatctgtatttgccggtatttgcacaatggtatttttaaaattcatctcagtaaatcccttacacggcgtttttatctctgccacaatagccggtaactcaatacctttttccaataaaatatttggtggacaactgaaagtatatgtatatagattgtctgtatcatcttttttataataaaaaaagaaatcaaaattgacatccttatatctataggtcaattccctcccatattcatgccctgcaataaaaaattctcgtacagaagtgaagccgttttcctgcataagtgtttttattttatcataatcagtaccaaatgctccaaaatccatatcaaaatcattttttataaagtcagaatcacgataagcccccaataaagtcccaaagtcaagccaaacatgtattccattctttttaagaagctgaataactgtattaaaaacaacatccgagttttcaaggaactttaccttctcttcagctattactaattttcggtgataacttaagaaaggttcaagcattatcttaaacagataacactttttcaaataaaaaagagttttggttataaaaaagcgcatattttctttactttaaaattaatgtttctaatgttttcagaatctctatattctgttttttaaatcggatatatatttcttcaaatcatttttatctgcaatgagaaatgaatagataacagggcgcataaaaccggaaattatgaaaccgtactttttttcaagagacagaaaatttgtgtttaataattcattgaactcaatcatattcttacaatacagttcgtatctttccttacggtaattttttctcatggcgtgtaaatggaaccaaagaaatcctccccaatatattttttcagagcttctcattatctctactattcggtttaaatccttttcatataaaggctgataataagtcttaccagatattgggaaaatcaaatgatcgccagaaccattgattggtggttgtactccattatcatatgtacccgctgccactcctatccgagtcgatttgaaaatattcagaccagaaaaagaggatataactttatcattttgtatcttcttttttgtataacgttcaaccatagtcatcaacttttcagggaaaaaaagcggagcgacaaaacggttaaacaaaaacgggagcttagcaaaaagacgtatcaaaaagaaatagtattgatatgatatatcttcactcaacgaaatagcaaccttctccttacaccgatacaaatcacaaaaagccttgagcttatctgtaaagtatatctgatctgcatcaatcttcattgcataacgatattgtgccttagataaagtatagttataataattggctaacaaatgcactgagtccatagaatagctggtagcgagttcataatccgcatcagataactcatgagacaagattttaggcttataataatatattctaatcttatcgggatattgtttcttcttttgaaggattatgtccaatgtattatctacgctatcctgatatgttatcaccagctcatccaatgcctcaatgcaggaatctatactctcagcaacaaaatccgcgtcattcttgattcttaataatcctgaaaccccgacaggttttaccctgtcaaaagatgaaatttcaacggaataatctttttcttccttttcttcgaatacccaattattatcttctacttttgacataacagattatttttttgctgtaatttaccaatataatactttctctaaatttaaatatgaataatcctgccaatacaaaaagcacagctataggaatctctatcgccacttttgcatatgcattatctattagcaatcccactccatatataaatatacccattgatactgaaatcgttaaaaccggcagcaactctttccactgttctcgcatagacagagatataaccttagaggtgaaaaacataccgacaaaaacattgaaaagtaaacttactgcaattcctgcacacatagcttttatccccaatggaatggttaacagcaatacagctacagaattgattttttttaaaacttcggatttcaaaacataatccgtacgtcctactgcattcaatactaaatagttgaagtttatcacaggataccacatataggcaatacataacaactgcaataacacagcagcaggactccacctatctgttaaaactatatttataatcgggtcggccaaacagcataacccaatcattaaagaaaatatcagcaagcaagtcaatcttaaataatgtatgtaatgttgcttcaatatttccggtttttcctgctgagcacacaataaaggataaataaccctatttataatgaaagttatattatatgacggtaattgagaaaagacgaaagccctattgtaaaagccgacctggtctgccgagaattttttaccaataaccaatgtatacagattggtatatatagtttccaataatcctgacagcaatagtttagaaccaaaattaaacaactctttaaaagatttcaaagaaaaagataacaaaggaaaccatctgacacaacaccatagtagaacaacatttagcatattgttaagcaaagtttgaaccactaaagtccataccccataacctgtataagccaaataaacaccaactccaccacttacaacaacagctgccaaagaaataatagcttgcaatttaaaattcatatctaccgttagtttcgtaatctgaactatcgataatgaattaattattaaattcaaactgataactttagttagtaattcaagccttggctcactataaaatgaggctataaaaggggaacttacatataatattgcatacacaacaactcctattaaaacattaaaataaaaagctgtagaataatcaatattcgtccgttgttgtttatgtatcaaagcattagaaaagccacaatcaataaaagtctgagctatagccataaaaatagaaagcatagcaatcaaaccataatccgatggctgaaccaaacgagctatgatgacacttaaaatcaattggattgcttgcacagagaaacgttctattgcactccatagaactcctgatgccgttttccttccctctccctctgacatatcaacagttagtagctggctttattatattgtcaataatatattgtcctacttcatcaatatcattaaaatgaacctctaacggcaaatctttaccccaaacgttcttcactttttccaccaattccggtgtataataaagattaccttcttttatatccgcaactccatccagataaatagactctctattaatcatacgcatcttttccatagaaaagatagatgtgtcaaaatatgacgttgctaccgaaccggtagcatcaattatatagggataaccacctatttcaccgtttactccaggagtatgaattttcaccttctttttattagaaatagcatccaatatggaatatatgatattgaaattactggaagcattcatcatattacgcttttggtcaacaggcataggaatcatacaagcttttaataaagcatccttatctataggcagagaatcaccccgatagcgaacatccaacaatatatcaaccccttcggaatgcccttccttactaatcacaacatcatgaaaatgacttacgcacaatgtaatatcaatctcgttcagattctctattccatatttatcagcaatgtaaaatttcattctcggaatcaaatgattcaaattaccacttccaaaatcaaaataggcattccctgctgatttcagccaaggaattacggcatctgaataagaagtatttatagatatagcattgcagtctgccgcttcatacgctttcataatattacgggcataacgaatggacaaaggagtccaaattccataagcacgcaaattattccaagaaaggcttccatactttaaccccgaataaacacggctactattaattataaaatcaggatgccatttgtctaaacataatgctatagatgaaacgtcttccaaattacaatctgcctccacatctatcttgcttcgtaactgaccgcgaatagcagctgccgttctcacaatattgacatccttctgcattttctctgcattacgacctgcaaccactatgtgcaagcgcttgtcagacaggcttatcaaataatctaacaagtacactcctacactgcccaagcctattatcataatagttacgggagtatcagttttcattttggcctgtagcaaagccaatttctcatttattgatttcatgttgttttattaatgaataaacaatattataatcagatacagtattacaattataccatgtatcaacagggacaaactgcatagtatctaaaggtaaacttccaaaataaccttgaataatttcaagattagtaccacgaatttgggttggagtcaggtttcttatgactcctgataatctctcgacagaaaggaacttccagatttgtgccgaattatatatggcttgaaacggttctgcaatctctaacgacaaatgcttggtatcataaagataatgtatatgaccgttcatatctacatataaaacgacggattttcgggaagtaataaattcacggttagctgtaataacattgttgtttgaagaaataacctgttcgaagctacctccatcataaaacagatctccttccacaaatattacttcatcacattccgatggaacagcctctattccttttatcaaactatatcccgatccgtaatcttcataatgagaattatagaccaactctatcttatctttgaattcctgcaaattacaatttataaaagcggacagttcttcaaacaaatatccgcctacaattatatatttgtcaagactacgggctttatccaaaatctgataaagcaatgagtatcgaggattttcctgaaaataaagacacttcaaggtatctcgagaagtatccttattgaatcgggtagctgtgcccgctactgttattattaaagctttcatctgtatttagaaagattttgtacacacatatccaacccctccgataatgaaactacaggtttccagtttgtacgtttgcgaattttatcagtatccaatatcctacgttccggatcagaagcgcgatacccctcaaactttattataggttcggcaatattcaacttatcggctatcagcttcactaaatcaataattgaaacttcttcatccgtagctacattataaactgtaccgtccaatgcagaggtagaagccatcaactctaaaactgcacgacagctatctatattatgcaggaaagaacgcatattcttttttgaattttctaataatataacctcaccggttttcgataaactatctatgatatgaggaattatgtgtttggcaaaacgctcatgattactataaacattggcaaaacgaatggaacaaccttttatcagccctttatccaccgcatctttcataaagaattcggtaagtaatttccctacggcatagctggttctctgactgtgctcagctgtggcaagcagcaaaaaatcatcttcctttactccaccgcattcattccaggattgcatggaataaacttccgaagtagaacaattgatataagtatcggcatgtacagaaattgcctgttgcaaaaaagagcgcatggatacgacatttgttgtaaatgtatgctcaacctcataaaaatgttctgtatgtactacggccgcacaattaatatatatagtccttgcataatcctgctgaatcctcccgactaaacgagatatttcagacatttgctccacattattcaaatcatactcatagaaaagaaaattcttattgttcacaatatcttgcacagcatctatagaacttgcaaaaaagttgtcaaagccaataacagtatgcccgtcattcaaaagttgacgggcaagttcattaccggtcataccggtaacgccgcttattacatataaattcttcatatccaatttaaactccaagaattaaacgttccttataaaacacatccaaaaaatccggatatagtcgatattctgcttcaacatcgtactttaccgcattataatgtaccttgcctgtcgatagttcaaaataaacatattgggcacaaggattttgattgcgtggttgtcctacagaaccgggatttatgaaaactgtttttttcttattacgcaagcgaggacattcatccggataaaaacatgacatattatgaggaagatgggtatgccccgaaaaaacatagtcataattacgataataaatattggaaaaggcatcaggtcctaattttccccaaaaaacatcatttatactcccatgaagaaacaatagatgcttgccctgacactctattgcatgtaatcctgttgaaatcatattttcttttatgtataaaagagaggattcgctcagaatagaagaagtatattgaagcatttgtttaccacgttccgtagaaaaatggctcaaatcaccatcaagcaaagccttttcgtgatttcccatcagatttacaactacagggtaggaaagtttctctaattctgaaatcacttcattgggacgcatcccgtagttaatgatatcccctaatataacaactgcatccggcaaatatccctgtgcttgaatgtcagacaagacagcttttagcgctgttaaatttgcgtgaatatcggataatataacaaatttatctttattcattatgcgagaggaattccatgaaacattccttgttttccagtgtggtagtagtaggacgacctaaatctgtacgagaatcaatctttaccttcaactcaagcagtacgggaccatctaacaattgtaaatgttgtaaagcttcctgtatttcagactctgaagtgacagaaaatgcatgacgatagccacaggctcttgctattgcaggtatatcaagttggaaacccaatgtaggctgccccccaacagattcgtgagccccattattaaaaagaatatgataataattagcaggagaaagactgccaatattactaatagcccccatatgcataataaaagcaccatcaccgtctagacagtaaactttacgttcgggatgttttaaagcaattcccaaagcgatagaagaactgtgtcccatagagcctacagtaagaaaatcacgactgtgtccatgtcctttgacctcacggtattcaaacaattcacgtgagagcttgcctgtagtagaaacgacaatatctgtttcgtgtaaatgatctataaccagcttcaatgcatcttcgcgagataaaggataaacattgttctgctttttctgaagtttatatttatcaaaagtatctttacggaccactatggcatgaggaacagatttctcataagcagacacaataacttcatgaatctgagccaatgcttcatcttcatccatgtcaagaatgatatagggaattttcatagcttccaataaatccaaagtaacctcaccttgctttttatgctgaggttcatcttttgttccaggctcaccgcgccagccaaccattaataaaataggaagactgtaaactttttcatcggcaagagacaatagcggattcaccgtattacccaaacctgagttttgcatatataccaaaggtagtttaccggaagccatataatatcctgcagcaataccaacagcagtaccttcattggcggcaatgatatgtttgccagcagaagcatgatctgtaatataagcgcaaatgttcttcaacaaagaatcgggaaccccggtaaaaaaatctacaccgtgggcaagaaaaagattaaagactttctcgacattcagcatactgtaaatatattatttagtaccaggaatcaattccaaaatctctttaataggcatgcataaatcacggacttcctgagctcgtccgttttccaaaatagtacatgcaacccgcatcatggccggataagcagcacgaagcatgtgattggcataaattaccacattcaccccccacttacgaagttcgctttcgtgaatatgatcatatgtagtaggaacaacaacaataggaacgtgggcatacctctgacgaaaagtaagacagaattccttgatatcttcaccggacttatttttactatgaatcataataccatcagcacccgcttcaacataagcataggcgcgttccaaagcgtcactcataggtttgccggcaataaggctttcaatacgggcaataatcataaaatcctgagtaacctgcgcttccttacctgcttttattttcgcacaaaaaccctcaatcgtatcttgagtttgaattgcatcagtaccaaaaagagagttttttttcaatcctactttatcttcgataataatcgcagaaataccatggcgttcaagcgtacgaactgtgaatgtaaaatgctctatcttgccacctgtatcgccatcaaaaatgataggtttagtagtacattcaaggatattattcaaatcctgcaaacgagttgtaaggtcaacggcctcaatatccggtttacctttactggtagaatcagtcaaactgctagaccacataccgtcaaaaacttcacgtttatcacctttctggatttcaagattctcaataataagtccgcaaagaccatcatgcgcctcaagaatacgaacaatcggtttagcatttattaaacggcgaagagtttttaaacgaatatcaggagttgttccaatagattttatctctttatcaagagaagaggaatttatacctttcgtatatggtatttctatcacctttcctccttgctcattcattacctcaaatacctgttcacgaatttcacgcaaaggaccgtttttccaatcatcgccgtgaatgatatagtccggtctgatacgttttaaattatcaacataactccactcttcctgagggattacttctgaaactcccttaatattctccaccacttctttacgctgctcgtatgtcagataaggaaggcgcttatgttctgcaatggccttgtctgtcaaaagaccaactattacatcgccatatttggtggcttcattaatgatatggatcagaccgggatgcataatgtcagcggtcataccaatataaactttcttattcataaattttatataagttagttattatgttagcactaaatttgaacatatcgtgaaaaaggaagtaagcactctattaattgcatacgccttcgggaacacttgtaaagcactccaatcgttttttactaattaatacgttttgattttgatattagcttgtagctaaagattttatcagctgtcgtgttaacaaagtcatgacaactattaaatacccttggaaagtgataaattaccgttatctcaacttcaacatcactggcataatgaagtgaattattgcattgaatagcaaacttctgctgcccatcattcaaactaaattctgatagaacccaagtttggtacttgaaataaaatcttttagtccttcactgttatacataacattttagtttgtagcaaaagtatcgcttttaaaggagaagcctaaacagagggcttactcaataactcaaaataaagacttaattttaaaagtttatggacaaactaagatttgcatatttatgtttggggaagcatcagaaccggcttccgaacaatgccaactatcttgactgttttaatatttctgctatggtatgacgaatcatctccggagattgccgtgtatccaaaatagaaataatcaaaatctcgtttcgggatatggcataataaataacattaggagtatttatcaaataacggacatcgtatttatcatctgaaaaatagaaatcgcgcattcccatacaagggaaagaagccaacagatttatgtgagatgaaatcttgtattttacttttgttgcaactgcctttccaaataaagaatctaccttctccagcaaagaaacgaaatcttctatggcagaagccagccatactatttccatcccattcgcaggttaatcatctcatctacctgtgaattgggaatacaatgccctgcacgttgttcttctatggcaaaatccactaaattacgcatcatctccttaggtaaagaagctatgaaatcatccacattgcggcaggacgattcgtatgccatagcagcctcattggctgattgaggctccggctcttgattcttatacaacttggcttcgttcatcgctccttaattttcttcaaaaataaacctaaatatcggaaatacctaaggtttactcacttattttcttcactgtatttgcaatcatctatcgtttcctatctctcaaataatcccaccacagattcaatcctacccaaatcacaatatcggcaatcagcagcaccgtattgtttatataaggaaccaacaggatattggccgcactgaaagcgcaggacatggagagcagactcagcatcgcccttcgcggcgacagccctatcgccagcagtttatgatggatatggttcttgtccggctcgaaagggctgtgtccctcgcggatgcggaccaggacgacacgcaccacatcgaacgccggaataatcagggtgctgaaagctatgagaaaggcgccttcggtgtaaggcatgatatccgtgttgtgctggctgtactttatggcaaggaaactgagggtatagcccaaggtaaggcttcccgtatcgcccatgaaaatcttgcgggcacgctccacactgccgaacacgttgtaatagaagaacggcacaagcacgccgaaagtaccggccgaaagcatggcatagctccacaggcccttgctgatgaacaggaaggtgaaaaccagcaatgccacactgttcaagcctgaggcaagaccgtcgatgccgtctatcaggttgatggcgttggtgatgaagaccaccgtaagcacagtgaaaggtatgccgacataagccgaaagctcgtgtatgccgaacaggccgtacaaatcgtttatccaaagtcccgacaaggggaaaaggcaggcacagaagatttggatggcaaacttctggcggtagcgcacaccgacaaggtcgtcggcaatgcccgtcaggtagagcagcgtcatgccgcaggcaaacagcaaaagttccggaagcagatagctggcatagagcgtggaaatgctgttgccgtccagcaggcggaaagcatagacaaggcagaaagcaaacagggtggtggggaaaaatgatacgccccccaaccgcgggatagctctcttatgtatcttacggtcatccggtatgtcaaaaagttttttgcgcagggatatcaataggatacgcggtatcagaatacgggcaataactgccgatatcagaaaggtaagaataataaaaatgaagttcacggcaataactgttgtttagtaattagcggttgatagctgaaaaacataaacgcttactgacagggagagagaggaaaattgtcaggcagaatcaatctataatctcgaaagggtattgattctcttccatattcttcaactcgccgatgatttccttctgctccggcgtcaaagaagccatatcccaggtattgataatggagtgggcctcagcggcaagtttttcttcgtatacctcgccgtagcagcaggttagaagacgcactttcagaagcgaatccggaagcttgtcgagaacattcaggcaacggtcgagcaggcgctggatatactgctgcttgcggccattgtcgtagaatgtggcattcagggctacgagaatggagaggcaaagttcggcttcctcttccggcgtgttgccttccaaggtgttgtacaaatcaagcgcttgctcgtaaacttcgcgattcagacgggcaaagtgatcgctgtaaatgggactgccgtccatgcccagattcaagagttcatgggcacggacgtacaaagatgaaacgtgttcgttcatttttatactgataaataaattattgaattacaagtgtttcagattacacctatcggttctataagcgaagagtgaataaatgtagtggctactgccatgacgccttctatgtttaccaccacacggcggtcgtggcgcagacggacaaactcgcccacggctccttcgaaaactccgcccgtgatgcgtactttggttcctttcaccagtttcagttcttccggctccacgtagatgacggcctcgtcgtacgtgcctgcaaccagtatgaagctgcgcatctgcgcatccggaataataaccggctgatgggtctcacggttcatgatatagcgtaccggtatgttcagaaccggattgtttttgatttcatcgatacgggaacgggtggaacggagaaataccaggttgtgtatggcgggaacgagcttgcggacgcggcgttcgttccttatgacatactcgtagcgcatggggatgaaattctctatattttccttgtcgagatagtccttcaaggacaattcgcggctgtatgttacgcggacggcataccagtgcaactggcaatccttgtgggactgacacacaggggcgtgctgcaattctgcttgattattgtctgacggaccgggcattacaaaatacggattgtaagagtttgaggaaaacaccaccttgtgaaaaggacgttctttggggacaccggttcaagagcactctttccggtcaattcatgtaatgcaattatagtcaatagtttagtctgcatccatattatcccaaagctccccactatcacagaaagagaacgttgaaacagttatgtgatcaataagccttcgggaagccgcaaacggatgaaacagatacatttccggacattcccgattaatgaatgcaaagatatggcagttttttgtattggcaaaacatttggtggaaattcttcggtttaccgcctgccttcaagcatgcctttcagttcaaggcaaagccgctgtttcacttcgtctgccggcacttcccgtcccagctccttttgaagcgaagtcacccccttgtctatgaacccgcaagggtggatgtagctgaaatagcgtaaatccgtattgacattgagcgccaggccatgcatcgtaacataatggctgctgcgcacaccgatagcgcagattttgcgggcacgcggcgaatctccgtccagccatacgccggtggctttctccacacgtccggcggttatcccgtagaaagcgcatacgcggattacggcttcttccagcagatgcacatattctttcaagcccagagagaactcctccaggttcaggataggatagcacacaagctgccccggcccgtgataagtgatgtcgccgccccggtctatgtgatagagcgaagcgcctatggcacgcaactgctcttcgcccagcagcatattggtttccttaccgctgcgtcccaatgtatatacatgcggatgctcgcagagtacgatacggttcacatactcctctcctgcctgcttggcatgcacaagcgcatcgaaacacgccgtctgcctgtcccacgcctcggcgtagggaacggttttccaatcagatatttccagtttcataagacaaacatactattttaccgcccaaccgcacgtggcatgattggagcacatgtccggagcttcatccggtccatgcaaagatacgaaatcccggaattatacaagcatcccgggcgcaggcttttttcataatctgaccatcgtcaaggcacgaagattatttttcggacgaaagcatgcattacctcccccctattttataattttgttgccacattatatatataatataaattgaagagcatgaagaaaatcgttgtagcaccggactcgttcaaaggctccctgacttcggccgaagtggccgatgccgtggaaagaggaatcaaggatgttttcccgcagtgcaatgtcgtcaaagccggtgtggcggacgggggcgagggaaccgtagaggccattgtcaaagcggtgggaggagctatgtacacagcctccgttacagaccccttgggcagaccggtaaaggcagcctacggcattgtaaggtcaggcggcgtgaaaaccgccgttatggaaatgtctgccgccagcggactgccgctcctgcttcccgacgaactgaacccgtggattacttctacgtacggaaccggcgagatgatttctgacgcgctgaacagaggatgccgcaaattcctggtcggaataggcggcagcgccaccaacgatgcgggcacaggcatgctctccgcattgggagtgagatttctcgacagccgcggacaaaggctgaaaggctgcggcagggatttggaatccattgtccggatagacatgtcgtctctgatgcccgcagcacgggagtccgaatttatcgtggcttgcgatgtcaacacccctttttgcggaccggacggagcggcccgtgtctttgctccccaaaaaggagcagaccctcaaaccgcggaagccctggaccgcggcatgcgttcctttgcccgggtgatagccggacagttccagaccgacatagtccccctgagcggagccggtgcagccggcggattaggcggcgccttcaaagcctttttaaatgccaggctgaccgcagggattgaaatggtactcgacgccattgcattcgactcgcttctcgaaggagcggacctcgtcatcacgggcgagggacggatagacgcccagacagcagcgggaaagacagccgcaggagtcctgaggcatgccgcacggaaaggaatccccgtcatcgccataggcgggtctgtagcgatgtgccgggagcttaaagagatgggatttatcggcatatattccatcataaacgctccggtgagccttgaacaagccatgcggcaggattgggccactgcccgcatccgatgcacggtagagcaaatcctgaccaccatgaaacattgcaccgggacattgttgtttcaaaaaggcggagattgaaaaataaaagtgtaactttgcacagaccaaaaacgacaacgcttatggaatttccacacgtcgaccttcccgtagacctgattgcatggacagatgtcacggaagacatcctgaacatctacaagcaatcgtgccggctgaaggcatgtatcttcgccttgtgcaccgaaggttccatcacggtatccatcaatcttatagataccgaaatcaggcaaggcgacttcatcatactgcttccgggcaccatcatccagtttcacgggcagaaggagaaagtgcgcatctgctttgccggattttccgaacattgcctcaacggagtcaacatcatccagtccaccatgagctcgtactccaagattatagaagctcccgtgataccgctcaacgaaaccctcgcttcctatttccgggattacttcgcattgcttgcccgcatatccaccgggccgtacatgcccaagacgcgaatggcgcagaacgtgctggacaccctgctttatggtgtcaacgagctatacagcagccgtcccgactcccaaaacaggattaaaagccggaaagaggaaatctgccgtgagttcatacaactggtcatcgagaactacaccaccgaacgccgcgcgcagttctatgccgcaaaactgggcatatcgctgcaacacctcagcaccaccatcaagcaggtgaccgggaagaatgtgctggacctcattgcgcatgtcgtcatcatcgacataaaagccaaactgaaatccacggacatgaccatccaggaaatagcctattcgctgaacttccccagcgcctcgttcttcggcaagtatttcaagcggcacttgggaatgagtccgctggaatacagaaacagctaaccccctaccccttcaccggcatgatgcaggagagcgctatgaccgttacagccagcatgggcgtcaacagtattccgtacaccggatagagaatgcccgcagctaccagtacgcctgccagatgaaaggccattgtccggaaaaagttacggcgcatcagccggagcgtatggcgggacaggccgaagagccgggggagcgactgcaaatcggcggatttcatcactatcatagccttgtccgccagcccatcaccggcacttgcacccgcagcaatacttacatcggcggcaaccagcgcctgtgcgtcgttgacgccgtcgcccaccataaccaccttcttcccctgcaagcggagttcgcagataaaggcctccttatcctccggctgggcgtcggacatataacggatgatacccagcttccccgctatggccgaagcggtacgctcaccgtcgcccgtcagcatacagatgtccagcccctgccccctcagctctttgactacaccggaagcggtcgctttcagtctgtccttgacggctattatggcaagcagctcatcctcacgcccgaagtaaacgatgctgtttccctccgattcatactccaccagcatatctcccagcacatcggaaagataagcccgataatctttcagcagcttatggctgcccacccaatattccgtaccgttgcagagggatttcacccccttgcctttcagcaccccgcagccgtccagcggtgcgggagttatgcgttcttcgcgcagggcggcggtaatggctgctgccagcgggtcgggcgagttcatttccgtggccagcaatatccgcttgaaatcctcttcctgatactgcgcccacagccaggcggtgaccgtaggctgcccctcggtcagcgtgccggtcttgtcaaagaccactacatcggccttgtccagccgctccagcgccagggagtcctttatccggatgtgcatatcggcagccctgcctatgccgcgcgtcagggcaagcggagcgaccagccccagcgcacacgggcaggcgacgataaaaacggaaacgaccgcatagaacgcatgcggcacagcggtcatgccgccccagaatatccagataaaaaacacggcaaccgccgttcccgccaggacgggaaagaaaatccgggctatgcggtctgcaccgtgccgctcttcgggcaggaagcggaacaccttgccggtgagccccaccgctacaaccagcaccgccacttcgtagtagacatacgggtgaagccccaccctgagccaatagtccggaaagaacgtgttgaacaggctgaaaaggaaagcaacggaagcgccgaaggcaatcagcgtatccagcccgatgcgccccgcacaaagctgcttccgggcggccgcatagaaagcgtttcccggaaacagcagcacaagggcagccagcgacatctgtatttcgttgacatagggcacctcaccgccgaagacggaaagcagcgacagcaatacggcaagcacccacgcggcggcggccttcatcttcaggcaacggtaccgcctgttccgctcttccatctcacgttgttccatactaccggcatgttccgcgccgtgcagtttctgcgcagaacatacgttcttcaatatattgttcattctatataaactttagggggttgttactctgaacttagtaaacaaccggaacggagcgtttgttcaattcctccttcccctccggcccgtacgcaagctgtggcgcgcattgcggaacgggaatatccgtcttgtgaggcgcacgggcggggattgccgaagataggaagttttaaccgcctgccgggattatttttttcctttttatgcgtggagttcactaataagttctatatttgtcgataaagtttcctgaatgaaatgttgttttataaacgaaatccaatatgaaaaaacaaactgtcagcctacttgtccttctgcttgcggcaagcggctttttcttttcctgtggtaacaccatgaacaaaaacgccggagcgctggagttcgacagcatacaagtgaacgaaaccgcccatctcttcggtgataccgccaagccggcatgcaaccttatcatcaaccttgcgtacgcttcccaatcttcggacgggaagatgaaggacagtctgaacacctatttcctctccgcctgcttcggcgagaagtacatgggcatgactcccgaagaagccgtaaagaagtacaccgaaaagtacgtgggcgactaccgcaaagacctggaaccgatgtaccgcaaagacgagcaggacaaggagaatgccggagagataggggcatggtactcctactataaaggcatcgaaagccatgtgcaactgtacaccgggcatctgctcgtttaccgcatcgactacaacgaatacaccggcggcgcacacggcatctatatgtccaccttcctcaacctcgacctgcgcacactcgctcccatccgcctggacgacctgtttgccggcgactacaaggagcagctcaccgacctcctttggaaccagcttatggcggacaacaaagtagccacccgccaggaactggaagatatgggatacgtcaccaccggcgacctcacgccgaccgagaacttctacctgggcaaggacggcatcacattctattacaatgtctacgacatcgccccctacgtaatgggccccgtaaagataacactaccgtacgaaatgatgcagcacctgctgagcgacgaaacaatggcgctgaacgacgtgcgcaacccataacccataacttttataactcataacacaacaatggaacttatcctgaaatactttcccgacctgacagaggagcagaaaaggcagttcgccgccctctacgacctctatacggactggaactccaaaataaacgtcatctcgcgtaaagacattgaaaacctgtacgagcaccacgtgctccactccctgggcatagccaaggtaatccgcttcaagccgggtacgaaagtcatggacttaggcacgggaggcggctttccgggcatcccgctggcgatactctttcccgaagtgcagtttcacctggtggacagcatcggcaagaaagtgcgcgtggccaccaagatagccggcagcatcggactgaaaaacgtaaccacccgccatgcacgcgccgaagaggaaaagcaactgttcgacttcgtggtgagccgtgccgtaatgccccttaccgacttgctgaaaataatccgcaagaacatctcgcccaaacagcagaacgcactgcccaacggactcatctgcctcaaaggcggagagctggagagagagacgatgcccgtgaagaacaaaaccacgatgtggaacctcaaggaattcttcggggaagagttcttcgagaccaaaaaggtggtgtacgtggcaaactgaacgagcactccggaaagctaatgtagcactttagaaaattaatgtagcactttagaaaccgtaacaaacaacatatcgaattaaacgcctatatatacgccatgaagataaagagatttgaatttaacatgttcccggaaaactgctacgtgctgtgggacgaaaccctggaagccgtagttatcgatcccggctgtttctacgaagaagagaaacaggctttaaagaactttatcatcagcaacgggctgcaagtgaagcacctgctgaacacgcacctgcacctggaccacatcttcggcaaccccttcatgctgaaagaattcggactgaaagcggaagccaaccaggcggatgagttctggattgacgaagcacccaagcaaagccgcatgttcggtttccagttgccggaaccgcccgtaccgctgggcacttacctgcacgacggcgacatcatcaccttcggccatacggagctggaagccatccacgtgccgggacactcgccgggcagcctggtgtactactgcgcggcagagcactgcatgttctccggcgacgtactgttccagggcagcatcggccgtgccgaccttgccggcggcaacttcgacgaactgatagaacatatatgcagccgcctgttcatactgcccagcgaaacggttgtctatccggggcacggagcccccacaaccatcggcaccgaaaaggcggagaacccgttcttcaggtaagcctccccccccgttctccggataaaaaagcccgccgcagaaagcgcaggacaccggtccgcccgtagcagacgcaagtaccggtccgccccctgcggcgaaaacaataaacttctaaatcattaccgttatgaaaaacgacctattggctaaccgccacatcggcatcagcaaaaaggacgaagagcagatgctccgcaaaatcggagtgagcagcctggacgagctgattgataaaaccatccccgcgaatatccgtctcaaagaaccgctggcactgcccgaagccatgaccgaatacgagttcggacagcacatcgcggcgctggcagccaaaaacaaactctacaccacttacatcggcatggggtggtacaacaccgtgacgcctgccgtaatccagcgcaacgtgttcgagaaccccgtctggtacacctcctatacgccctaccagaccgaagtgtcgcaaggacgcctggaagccctcttgaacttccagaccgccgtatgcgacctcaccggcatgccccttgccaactgctccctgctggacgaggcaaccgccgccgccgaagccgtgacgatgatgtacgccctgcgcccgcgcgatatgcagaagtcgggagccaacgtagtgttcgtggacgaaagcgtattcccgcagacacttgccgttgtcaccacccgcgccatcccgcagggcatccaaatacgcacgggcaagtacgacgaaacggaactcacgcccgacacctttgcctgcatagtgcagtatccgaatgccggcggaaacatagaagactaccgcgcattcgtggagaaagcgcacgccgcaggctgcaaagtggcggttgccgccgatatactgagcctcgccctgctcaccccgccgggagaatggggagcggacatcgtattcggaaccacccagcggctgggtacgccgatgttctacggcggcccgtcggcagcttatttcgccacacgcgacgagtacaagcgcaacatgccgggacgcatcatcggctggtccaaagacaaatacggaaaactgtgctaccgcatggcgctgcaaacccgcgaacagcacatcaaacgcgaaaaggccacttccaacatctgtaccgcacaggcattgctggccacgatggcaggcttctatgccgtataccacgggccggaaggcatccgcaccattgccggacgcatccacagcatcgccgcattcctggaaaaggaaatcaataaattaggatacaggcagatgaacgcccaatacttcgacacgctccgcttcgccctgcccgacaatgtatcggcacagcaagtgcgcaccgtagccctgagcaaggaagtgaacctgcgctacttcaagaacggcgacgtgggcatgagcattgacgaaaccaccgacctcgccgcagtaaacgtactgctctccattttcggcatcgccgccggaaaggactataccaaagccgccgacatccccgaaagctgcaccattgcggaagcgttccgccgtcagagcgcgtacctgacgcacgaggtgttcaacaaataccacacggagacggagatgatgcgctacatcaagcggctggaccgcaaggacatctcactggcgcactccatgatttcgctcggctcgtgcaccatgaagctgaacgccgccgcggagatgctgcccctcagccgcccggaattcatgggcatgcacccgctcgttcccgaagaccaggcggaaggctaccgcgagcttatacacaacctcagcgaggaactgaaagtgataaccggctttgccggcgtaagcctgcaacccaattccggcgctgccggagagtatgcggggctgcgcgtaatccgcgcctatcaggagagcatcgggcagggacaccgcaacaaggtgctgatacccgcttcggcgcacggcaccaatccggcttccgccgtccaggccggtttcaccaccgttacctgcgcctgcgacgaacagggcaacgttgacatggccgacctccgcgccaaagccgaagagaacaaggacagccttgccgcgctgatgattacctacccctccacccacggcatctttgaaacggaaatcgtggaaatctgccagattatccatgcctgcggcgcgcaggtgtatatggacggcgccaacatgaatgcacaggtggggctgaccaaccccggatttatcggcgccgatgtatgccacctgaacctgcacaagacattcgcgtctcctcacggtggcggcggaccgggcgtaggccctatctgcgtggcagagcatctggttccgttcctgccggggcacggactgttcggcaatgccgccaatgaagtagcggcagcacccttcggcagcgcgggcatcctgcccatcacctacggctacatccgcatgatgggtgcggaagggctggcacgcgccacgcaaacggccatcctgaacgccaactacctggctgcatgcttcaaggatacctacggcatcgtttatcgcggggcaaacggctttgtcggccacgaaatgatactggagtgccgcaaggtgcacgaggaaacgggcatcagcgaaaacgacatcgccaagcgactgatggactacggctatcatgcgcctaccctctccttccccgttcacggcacgctgatgatagaacccacggagagcgaaagccttgccgaactggataacttcgtacacgtaatgctcgccatctggcaggagattcaggaagtgaagaacggcgaagcggacaagaacgacaatgtgctggtaaatgccccgcatcccgaatacgaagtggtggccgatacatgggagcacagctatacccggcagaaagccgcctatccgatagaaagcgtacgcgacaacaaattctgggtgaacgtggcacgggtggacaatacgttgggcgaccgcaaactgctgcctacgtgctacgggtgcttcgaatagggtagtgaaatatacccgatgatttttttaggcacggattacacggatttacttgattttttctgtttctgcgaactctgtgtaattcgtgtaatctgtgtaatccatgaaacctgtggaatccgtggaatccgtgtaatccgtgcctgaaaaaaatacataccatttgtttctttgtttatatatcctcccctgcttttatgccacaaataaatctatgagtaccactcacaaaagaaaaaggaacggtctcttctacagcagaggcgaagaaacggtcaacagcctgtctcacggcataggcatctcgatggcggtcattatcgggggattcttcctgatgaaatgctaccgggcacaagacccgtgggcgatactcggcatgtggctctacctgttcggtatgggcggctcctacctgtcctccaccctttaccactccctgaagcaccataacccgtggaaacggcgattgcgccattgggaccacgcggctatctactggcacattgccggaagcttctctcccgttacgctgattgccttgcgcgatgaggggctatggggctggggactgttctgctttgtctggttgtgcgccgttgcgggcactatcatcagcttccgcaaaatgaaagaacacagctatgtggaaacggtgtgctacatccttatggggctgtccgtgctggtggtgttcaaacagctttttgccgttgcgcccgtgtcctgctattggattatcgccgaaggggtatgctatataggcggtgcggcgttgtattccatacgcagcgtgcgctatatgcactcggcttttcatttcttcgtactggcagggtcgggctgccaccttgttgccgtatggtacatcctggcggggatataaacaggctctccgcctatacatgacacatgcaccgtcagcggattacggttaccgtgcctgctgccagcttcttctctttcacgggagcgtccgcaggggcatagcccaaggcggcacagccgtacacacggtgattttcggggatgccgaggcgggtgaggaaagcacgcacgtcggggtcgtcgcaggtctgccccaattggttaatccagcaagagccgatgcccaaagacttggcggcaaggaaaatattctgcaaggcgtatgcgcagtccatagacgcccaccagcgggtaggctcgttggagacgatgaccagcgtcggagcatggtaatagcaacaataggtttcgctatgtccgcgctcctgcaaatgagggtcgtcgctcttggcaaaagcgccttttatcttttcattcagttcggtcagcacggcggcatcctggatggcggtgaaatgccacgtctggaagttcatgccgctgggggcatacgctgccgcttccagtataaggttcaaatctccggcggaaacctgccgttccgtataagtacgcacgctgcggcgcgacttgatgttttccaatacttcgttgctcattgtcaggatatatgtttttttatgtaaggagagtaaatgcgtcaagtttcagtctgccgttccgcccatacggcgctaaacagacggtcagcgctttaccaatcctatctttacgttcagtttaaagtaatacacaccgttctcccgctccaggaagccgtatttgtccttatctaccgaacccttctcgaaacgggtgttccggtaaaggaagtcggcaaaggtctgccggtcggacttatggtagcagagcaccccgccgtctccattggtcagcagcatgccttccacggcagagtccgtaccgttgtaaatctttgccggacgcatgcccgttgcaagcgccagcaggaactgcttcatcttgaactcgtagaagcggtgcttgtttatcagttcgtccttgattttcagtggattcatctccttaatgcgttccgtcagttcggcaacacgggtaatgccgtccaggtgcatgatacgcaccatctcggccagcatgcgggggaagtggaggtctatcatcagcaggttgcagcggaacacacggtcggcaacgtcggaatacttcaacacgccgcccagacgctcaatcatcatcatgcgttcggcaacttccataggcgattcgggcaaggcgttcaccttgtttaccgtgggtacggcaaacttcacgccgctctgctccagcttcagattggccgtgcgcccgccgtccagcaaaggattcatgtggctgagacgacaacggacggtgaagcccgtgagcggagcgtccgcactccagaaagctacggagaagtcggtacggtcatcggttctggactccaagtcgtagatgttcacagcatccagaaaggcttccagcccttcggaaacttccaccgcatcgccttgctcatttctgagcagatggagtatgatttccgccgcatcgccaaagtccgcacggggaaacgaaagcggctcttttcctgccgatgcggtaaacgtaccgtccttctccaccgtaccgctaacaatgcgcacatcctcttccccgatataataacggcgcgtgccgtcatgttcctctctctgtatcagcgccacaggccaacactttctatcatctctctgcgcgtccggcgttcccagaaagacctttccgtccgccagcagacggaagaaggtatacagttcgcccagctcgcgcttggttgcttcaaatgccatatcaactcgattttgattaaataagtgtgcaaagataagtaaatccgtacaaaagatgtggaaaacccggagactttacgcttcctcaaaacgtaaagtctccaccttctccagacgcgccctcaacttgggcattgccgacttgcggatgcggagcgtcatgcggcagtccatgtcgtacgactgctccagcatctccggctcctcttccttgacaatgcgcatcacatcgttcatgaaaggatactcgaaaaggacggtcaccgtttcgtccaccgtcttttcaatgacggtggcggcagcgatagcctcggcagcggcagccttataagccactatcagtccgctggttcccagctttataccgccgaaataacggactacgacaatcaggatgtccgtcagtccgttcgagtttatctgccccaagataggctttcccgccgtaccggacggttcgccgttgtcattggcacggaaatccttgcgctcgtgccccaacatataggcataacacacgtggcgagcatcgtagtatttcttctgataagtttccagatgcgcctttacttcttcaaccgtacgcaccggcaaggcaatagcgataaacttgctgcgcttctcggtataaattccctcggacgggacggctatggttttatacgtatcttcgctcatgccgcaaagatactacactttttgctatccgccttttgatagccggcaaaaaaaactttatcgcggcagaagaaagagccgcttttcagccgatgcgcctcctcaccagttgcagcaacggtttcgccgcaattatcagtgttacggcagtaagtatcatcagtacgccgagcatgatgcgcggagtgagctgctcgccaaacaccactacgccgaagaacagcgccgtcaccggttccagcgcccccaatatggcagccggcgtggagccgatgaggtggatggagagcgtcatcagcaccaacgaaatgatagtgggaaacaaagccagcgaaaggacatttgcccacagcaccggcgaagggacgggctgcaaagccgtgcaaaagtccagacgcaccacatagatgctgatgccgaagagcaaagcatagaaagtgagtttcgccgtaggcagctccttgagtgaagagcggttcacgccgacgatgtatatggcgtaggtcagcgaggagagaataacgaacagtacgcccagcatgctcaacgtcttcccgtccccaccctcgtacagcagggagatgcccgtaaacgccagcgctatggagaacatcgtgatgaaggagaccttctcgtggaaaaacaccgccatgatgatggcaaccagcaccggatagacaaacaggatggtggacgcaatgcccgcatccatgtagttatagctctcgaagagaaagaacgaggaaaaagagaacagcagccccattaccgccagcggaagtatatccgccttcttcagcgcaaaggactgtttcttcactttcatcaggatgcccagcatcacaacggcgaaaaagtaacggtaaaagaggacggagtccacactcattcccgccccgtacaagggcaatgcaaacaacgggttcatgccgtaactggcagcggcaacggctccgtaagtaaatcctttaagacgattattggtcatgacagtatctctttctgaaaaatcgggcgcaaagataccgcttttattgatacttggctccatgaagaactaaaaagaatcctgcacaacgcaagcatgccgcaagggaattgttcatgccccgttcttcattttataatacagcatacccaccgcgtctgccagcagccaaccgatgggaatagaccaccagatgcccgttaccccgacagaaggaatagccgccagtaggtaggaaagcgccacgcgagtgcccagcgaaatcaccgtgagcactaccgacatccccggcttccggacagcccggtaatagccgtaaagcaggaacagaatgccgatgccgcagtaaaacgcaccctctatgcgcaggtactccactccggtagcaaggatttccgtttcgcccggatggacgaaaatcagcatcagcggttctgcaaagacgaacacgagcacggagacgataatcgaaaagataaccgtagtaagcaaggcgctgcggacaccccggcggatacgcccgtaacgtttcgccccgaagttctgcgcgatgaaagtggaaaaggcgttcccgaactcctgcacgggcatgtatgcaaaggagtctatcttgacggcagcggcaaaggcggccatgactgccgtgccgaagctgttgaccagcccctgtatcatcaggatgccgaaattcatgaccgactgctgcacacaggtcagtgtggagaaagagactatctctttcaggctgccacggtcgaagcgcatgtctccgatatgcagccgcagttccggacgcttcctccaggtatagagcactattcccgcagaagcgactccctgtgccatgaccgtggctatcgcagccccctcgatgccccagtccagttgcaggatgaaaaacaggtcgagaacgatattcagtgccacagagagtgccagaaaccagagaggagttaccgaatctcccaccgcacgcagcatcgccgcatagaaattatagataaacgtaaagacaatgccgcaaaagattatccacaggtaaccgcgcatcatgccgtaaatgtcctgcggcacttgcagcaaacggagaatagggtccagccatacgaataccgccatattcagcacgcatgtaaccgcccctatcagtacgaacgacacgaaaatgctgcggcgcagggcggaatggtttcccgcaccgtaatgcagcgagaataccgtgccgctgccgatagacaaaccgagaaggatggagataaggaagaccatcagcgtatacgccgaccctaccgccgccagtgcatccgcaccgatgcactgccctacaatcagcgtatcggctatgttatagcactgttgcagcaacgaacccgccatcataggcagggtgaaacgcaacaacgtacccgttatgccaccccgggtaaggtctccgttccgtaacatgattgttcacaccctctcaggcaatgcccaacaacttcacttcgaatatcagtgtggagaaagccggaataggcccgctggtgcgtgtgccgtatcccacggtgtacgggatgtaaaccatccagtggtcgcctacacgcatctgctgcaaggctatctgccagccgtcgattacttcgttcagccggaaagcttccggacagttgcgcttccaggaattgtcaaactccctgccgttgatgagcgttcccttgtaatgcaccgacacaatactgttcgggcgaggagtagcgctactgccctgcccgctttccagaatacggtaaagcacgccggcagccaactcctttacgccttcttcggtacgcagattttgcaggaactgttcgttcttcagtttgtattcttcctttttacccatatcgttcttttggttttaataactaatgccgaataacggtatcttattttgacggcaaaggtcggcattttccgtataccggaaaagggaatggcaatataaaatagcgaaggtgcatcaaaacctgccaagtttccatgcaccttcttctcattcattctttgaaattatatctgaatcagtccagtttatgaattaccagtcccgaacgcagcttcggttcgaaccaagtggtcttgggcggcatgatattgccggtatcggcaatgtccatcaactgcttcatggacacaggataaagcgccaaagccactttcatctcaccactgtccacccgcttcttcaattcgcccagcccgcggataccgccgacaaagtcgatacgcttgtcggaacggaggtctttgatgccgaggatttcatccagtatcaggttggacgaaatggtaacatccagcacgccgatagggtcgttgtcgttgtaagtgcccggctttgccgtaaggctgtaccacttgccgtccaggtaaagggagaagttatgcaggcctgccggcttgtagatttccgttcctttctcttctaccgtgaagttcttgcctacggcagccaggaattctccgggagtcaacccgttcaggtccttcaccacgcggttgtagtcgatgatagtcaactggttggcggggaaacagactgccatgaagtagttgtactcctcgtctccgcgatgattgggattctgtccggctttctccgcacccaccagggctgctgctgcactgcggtggtgcccgtcggcaatgtaaagtgccggcatcttggcgaattctttggttatgacctcaatatcttcctgccggtcgataatccagaatgtatggccgaaaccgtcgtccggagccacaaagtcataaacaggcttctgtgccgtgtaacgggcaatgaccgcatccagcactgcattgtcgggataagcgaagaatacgggctcgatgttggcattgttcacacggacatgcttcatgcggtcttcttccttgtcgcggcgagtaagctcatgcttcttgataacgccgttcatgtaatcgggcacgtatgcgcccaccaccaaaccatattgcgtcttaccgttcatggtctgggcatatatgtaatagttctccttatcgtcctgcaccagccagcctttgtcctggaacatccggaagttctcggccgctttccggtacacacgttcatcgtgctcgtccgtacctaccggaaaatctatttcgggcttgatgatgtgatacagggatttttcgtttcctgccgcttcttcacgcgcttcggcggaattcaggacgtcgtacggacgggatgccacctgctctaccaaatcctgagggggacgaattcctttaaaaggttttattgttgccatggttgtctgagtataaatccattacttatttacgcggaacttctcgcagccgtctttcaggaagcccacaatctgtctggcagcggcaatgccggcattgatattggcttcggccgtctgcgcacccatcttcttcggtgtggagaagtaacggccggcaaacttggcggcaaatgtatcattggctgcgggcataatgtcggtcatgtacttcaagtcggcacgttcttccatcagttgtatcagctcggcttcattgataacttccttgcgggcggtgttcaccagcagaccgcctttcggcatcctgcccaccaaagcataattaatggagttcttggtttccgccgttgcggggatgtgcagcgaaacgatgtcgcaggcagaataaagctcctcggccgaagccacagcctttacaccgtctttctcgataacctctttcgggcagaaagcgtcgaatgcgtaaatatccataccgaaacctttggctatgcgggctacattgcggcctacgttaccgtaagcatgaatgcccagcttcttgcctttcagctccgtaccggaagtaccgttgtacagattgcggacagccattaccataagcccgaaagccagttcggccacagcgttggagttctgccccggagtgttcatcacacatacattgtgggcggttgcggcatccaagtccacattgtcataccccgcaccggcacgcactacgattttcagctctttggcggcatccaaaacctcggcatcaataatgtcgctgcggataataatggcattggcatctttcacggcttccagcaattttgccttatcgccatatttctccagcaaggcaagttcatagcctgctgcttcaatttctttgcgaataccgtctactgcaacttttgcaaacggcttgtctgttgcaactaatactttcatgattcaatggtattaaaaaaaaatcaccacagaaccgcacgaagtttcacagagttttccttttcatttcatctctgtgggactctgtgccctctgtggtgaacaaatattattaatgaagtttctcaaattcctgcatgcagtctatcaaagcctgtacgctttccttcggcatggcattgtagcaagatgcgcggaaaccgcctacggaacggtgtcccttaatgcctaccatacccttttcggtagcaaatttcaggaagtcggcttccagttccttgtattcgggagccattacgaagcagatgttcatgcgtgaacggtcttctttggcggcagtacccacgaacatcttgttgcggtctatctcggcatacagcatatccgccttttcgatggcgcgacgttccatttccttcacaccgccctgagcctttatccagcgcaatgtctgcaatgccgcatagataggaacaacgggaggagtattgaacattgaaccgccgtcgatgtgagtctgatagttcagcatggtcgggatgtagcgggacaccttgcctaccgcatcattcttcacgatgacgaatgttacgcccgcaggagccagattcttctgtgcaccgccatagatacagatgtatttggacacatcaataggacgggagaaaatatcggacgacatgtcggcaatcataggaacgtttacgttcaggtcttccttcaattccgtgccatagatagtattgttggtggtgatatggaaatagtctacatcggccggcaccgtataatctttcggaatgtaagtataagtggcttcagcagaagaggcaacctctacaacctcgccaaaacctttggcttccttcatggctttctttgcccacacacccgtattgaggtaagcggccttcttttcgaggaagttgaaaggtatcatgcaaaattccagacttgcaccacctcccaggaacagcaccgaatagccttccggaatgttaagtagttctttgaacagtgctacggcttcgtccactacgggctggaagtctttagcgcggtggctaatctccataagagacagaccggatccattgaaatctaaaatagccttcgccgtatcctctatcacctcacgcggaagaatggaaggtcctgcgttgaaattatgctttttcatttgaagtttgttttggttatacaatttcgttcgtttatgtctttcgacatggcgaaattacggaattatttctgcattgcaaatctttccttataaattttcttctttatcgcgtatttgccttactttttattggtatatacaagaaatatacgccaaactgttatgtacgcttaacaaggaaagtattaaaaagtaaactgaaagatagaagctgaaaaaactttctaccgggaataaaaactgaaaaaaaagtgcatgattatcaaaaacaagctattttcccatgcttaataacatcaccggatatgcttcataacatactgtcaacgagcttcttctatcaaagtcttcatccccttgattttttccccgcgcagcagtgtaagcaattgcttcactttgctgcggcggactgccacgaaagcatagtgctccttcacatccacctgtcctacatcttcgcgcaccagcccgcctttcttatacaggaagcccacaatgtccaccttgttcagtttgtctttcttgcctttgcctatatataaggtagtccagcggggtttggcaggtttcggcgtctgctccggcaattcgaatacggagagctcttccggaagataatcgggcagacgctcttcggcatgcagaagcaggaaagacgagccgcgcgcttcccagcgtgccgtgcgtccgttacggtgcgtaaaggcttcttcgttgacgggcatgtgatagtgcaccacgttgtcgatgcccggaatatccaatccgcgtgcggcaaggtcggtcgataccaggacggggcaactgccgttgcggaacttatagagcgcccgctcgcggtcgtcctgttccataccgccgtgaaaagcatcgcaagggaatttcttcgacttcagataggctaccgtacgctccacgctctcgcgatagttcacgaataccagtgtagaacggtcgcccagcgtacaaagcagccggtacaatgtctccagcttgtctttttcgggagagattaccttctgcaagtccaatcgtccggatacggtttcgcccgaaagaaaattcagcttgacaacctgcggtgacgactcccccccgcccactccggtgaactgcgggatttcctctgcatccgttgccgacagcaatacccgtttcttcaaggcaggcaactgtcctataacttccgccatctcgtcgtgaaagccgaattcaaggcatttgtcgaattcatctatcaccaatgtggttacaaagcgggtatcgaagttctgcttccgcaaatggtcgttcatacgtccgggagtgccgatgataacggcagggttaatgcccctcatcgtacggtgctcgtccattgccggacgtccgccgtagcagctcatcgccttgaaagggacgttcatcgacttgaatacgttttctatctgcaaggcaagctcgcgcgacggtacgagcaccaccgcctgtacgccctgcacatcggctttgagcgattgcaccagcggcagcaggaatgccagtgtcttgcccgaccccgtgggcgacaacaggacgaggtccttatccgattgataggcatcccgcgctgcttcctgcatcggggtgagttgctctatccgtaagttacgaagtatgtcagattgttccataaagtactttggtttaatggagcaaagatacgaaaagattggcggaaaacgaggtgatggtttataatgtttgcccacgcacgctgccaaccgttttccgccgatgtactaaaaagccagaacggcacgtacccggttagacgtaaggtccttacggtccatattcacattgccgctaagcatatagaccatgaacgcaatcttttcattgtaccgatatgacgaggatgaccagtaaaccgcccctgccaccttttcggcatctatgcccgatacagacaaggcggacaatttttcattgaccgtatcaatattactgccgggactgtctgtaccgccatacgtaccggagtccgtccaagcggactgccagcccgaacaaagagtggaaagctcgcgaacggaaggaaaataccaaccgctgctaccggcaggagcaggattggcagtggcatattcagccaccaatccgtaggcttcgatgagattgccgctatgactgtctttttcattccattctttcatttgcaatgtattgccatatccgcatatatcattcgcatcggcaacgctcataccggtcggagtatagtttcgctgccaataagtacggttgcccgcatctttcaaggcaaccaccagcccgtgaatatcatccgacttataattatcagcgttaccgccacctaatatttccttcaaatggctatcctttgccacaatatcgcctacataaaagacgatgccgacaggaatcctatcgggattaccgctgatgatctgacccgaaacagaaccgtcgctataatagtaatcaccggatttgggaacagtcagggcacgagtggaaaccgttttaccaccatcctgccctacaagagtcacttccaaaagggcacttccgtcctcccctatgcccacgggcattgtcacagttactttcgcgtctcctttgtaactgccgtcagcattgaaagtcggctttgttacagcgacctgccacgagcctgtagctgcgcgagtctgaatatccgtattcgcatccttactgatgatttgagccataatggcggtatagtcgttcttggaaaaagcatcaggaagtacaagaggaatctccgtcaccttgtgggtaacaaccagtgcggcattccgtacagctttcgcatcatcaccgatataaaaagtccggtaaaggggaaatgaaatttccgtatcggtttcttttccatcggcatcggtattggttatgataacaatgaccgggtcgctgctatcatcaaccttgatagagcaggaagtgccgtttactccgttcgtaccgtctttacccacagcctttactcccgtgggcatccagttagtagcgttgtcggtggatatttcccattcattattatctgcattaatccggacttgcggggcaatggcatcatcaccttttactcctgcatccccctgttttccctgttcacctgtgacacgcagggggctaccgttaccgtcttttatataatcaccgtcaagtgtccagtaatagatgccgttgtcttctttgacaccgatatcaggcgcattacccggtattccggtagcacctgtctcccctttatctcctttgacaccgttctttatggttatggctccacccttcatgaagtttatcacgtagccggttccgtcggccaattcgctgacacttgtcacatagtcattatcctcaagggcggagaaaagattttgcagactcgcaatttgtccgtttattgccctttgccactcttccagagcagaaaggcgggtgtcaagttctgcttgtttggcacgtatttcatcaaggtcttgcttggtgcaattgcataaagcaaatgttgcggcaagcaacaggaatagaatcttcttcataagtataagttttaatttaatatgggttttaatcaaatgaacggtttctgtcatttcaaagtccagagtatgccgaattggggcatccacaggacattatggcgtgtatgcccgtaaggtgtagtgataccatcgaatttattatcggtcatccacaggaagctgttcttcagttgcagactccaatcggaagcgatacgataacggaaactcaaggctccgcctaaaccgagagaaaccgtattcggccgggtaattccattggaaaaccgggtgtcggtcgccttattatatatgtcggctttgaagaattgcccatagacggtaggagtcagaacagcctggaaccggctgtacaaggcacggacaccaagaaaacgattgaaatatatatccaaacccaaacctatatttactacggatattttagagtaaagttctttgtaaggtcgggagcagtcagttccgtcagaataggccgtcataccggaaggagagagttgataatgctgtgcatagtcccgcgcacctgccttgccctgtgcatagtctgcagaaagatttgccccaaagaaatcggagaaacggtaatcagcttgtaggcctgcggatatgccaatgtaggttttatcggcagacatggaaagcatatcaccccaaaagaaaggaataccgatgttcaaaccaagagtccagcctcgaaaggaaaaggttacacttgaatcggatacgtttgcggatgtggagagaggagattccacgttgcggttcgaataacagttgtcagtaactgccggggcttcgtaaaggtctactttggaagtgcaaagttctactttagaagtgtaaagttctactttagaatcactacatttcacattgtcatttaaagaagagccaggcattctttctcccatcaccggcagatcatcaaccgctttatcttccggcaacacaatgcgtacaaacactacatcatccgctttcccgttgtcgcccgtgaagtttgtagtatgaaaacaatcttcacacaagccgttacgcactatcatttccgcttttacgcggttgctgcgttcacgtacaagacggcggttctctttagcgaccgatgcagaccggcagaaaccgctgacaaatacagggatattccctgcaagaatatctttctgatgctgttttagcagagcagataatctttccagctctgcactgttttccttgtaggggacgtagaacattccctgttcaggaacgaagcggaatgtgtacaggctgtctctttcagctccctgcattacaatgtagggtgaaaatgataaaagtacagccagtagcattaccggcaatgcggcaaatagccgcgccgatgatgctgtcagtaatttcgtcaggatacaaatggagatgcgttttcttttcgtcatgtgccatattattaagttaaacatacaaaaaacgtgagtcgctgtatctgtttatcctacaatcaggccttcgcattgcccagtacttggataaacaacagccactcacgccattttgtatatagatacgacactcccgtatatcccggaagagaagtagatatataacacagacgtgagcgttgttgttatcatcttcaagtacttttcaaagttgcgaagtttgattgtagaagataatttcaataacgcttcttaaaaaacaacagttccattgcacccaacgggactgctgcaaagataaacagttttttgtcagcaatagcaggatggtatgctttttatttcactatttttttgaagatgcacgaaagataaggttagctatttttttgagagcaaaaagaagaacaacacggactttctgcactgcatgaagtatattacaatttatcccggtcaaactcccgatttatcccggttaaacttcaagtttattgaggataaattttgagtttaacagggataaacaaagggtacccactggaaaaacaatcagtatgtactgaagaaaaaaacacatgtgtagaaaaagagccggtacagacggagaaaaaacaatggcagcaatatggctgacttaaagttcctctaccacccaacgctcgatattgcgcgtagtattactgaaattcacccctatcttgagtaccttgcggctgtccgctgcaaaaggcagtgcgtactgcttgtcgttaatctgctgcaaagcctcttccgcagtgccgttcagtttgaattccattacataaacgtacttgtcggtttgcagtacaaggtctatcctgccctgcgaagtgtgatactccgcttttacatagaaacccaccagtttgaaaacgatgaagagcacattctgatagtgcagctccagttctttcaccaattcgtagggagtatcggcaaagaaactttgcaggcggcggaagaaagcatcgggctctcctctctctatttcctgtacaaacttttgtatttcaaacggtgcttcaatcttgttgaaacgtgtatagtaaggtatgaggaatctaacaaaaccttcttccacctcacgattgggaaagccgagacgataaattccaaaacgttcatcatacccctttatcgtgagataaccgctctggaaaattacgggcaacggttcctcatccccataaatactgttcagcacatcggcatacgtttcggcatgcgccatgtgttccaggtcgtaatggtagcgtttcaacagttctatcaggtaggtgggtgttcccgtctcgaaccagtaactgccgaatttcttatatttaaaagtattcagtaagctgaaagggttgtagataccttcggtgttctctacgaaatgatagccgtcatatctccgcttcaactcggcacaggcttcctcgtaggtcattttctgagcgtctgccaactcgtgaagctcttcttcaagattatcgtgaatctcctgtccggttattccgcaaagaccgacatacatttcctgcatggaaatatcatccaggttattcaagtcactgaatacgctgatcttgccgaatttagtgaccccggtaaggaaagccagtttgatacagccgtccatcgttttaagcacaccgtagaaaggtttcagcgtgttgcagtattccttttgcagttccccgttgccgatagcctggagcatcggtttgtcgtattcgtccacaaggatcaccacacgctgccctgtctgctcgcaagcacgcttgatgattccggcaaagcgcaaagagtatgtacgttcggaaacatcggcgccataaagtttttcccattcggaaaggttcttctccagtatattacccagactttcgggcgtatcataccgttcgatgttcaagtccagatgcaaaatgggatgttccgtccagtctttctccagtttctcgatggccagtcccttgaacaattcctttttccctcgaaagtaggcctctaaggtggagatcagaagacttttgccgaaacggcgcggacggctgaggaagtagtaactgccggtcttggccaactgataaacccaagcggttttatcgatatagaaatacccgtctttgcggattttctcgaagttctgtattccgataggatatattttattgctcataccgtccactgtttttagattacgataaagcaaagatactcatttctttcgaaccgcctctatcctatgcccacaaaaaaactccggcaagagccgcagccctgccggagtttcttcactattttactattatgtgtctttgacaacaccgtttccttatccgccgaagttgtcgaacatcaggttctgagccggaacgccgaggtcgtcgagcatcttctcaacggctttggacatcgggccgggaccgcacatgtagtattcgatgtcttcgggagcttcgtggtctttcaggtaagtctcgtagattacgttgtgtacgaatcccggagtatacttcacgcccgctgcatcggctgccgggtcgggacggtccagtgcaaggtggaacttgaagttggggaaatccttttctatctgcaggaaatcttccaggtagaacacctcgttgagggcacgcgcgccgtagaagtagttcatcacacggtcggttgtgtgcagcgtcttcgtgaggtgcataatctgcgcacgcaacggagccatacctgcaccaccgccaatccacatcatctccttcttggagtcgaaaatcggatggaaatctccgtaagggccgctcatcgttaccttgtcacccggtttcaaggtgaagatgtaagaggaagcgatacccggcatcacatccatgaagcccgggccctggtctttcggcttgaaaggcggagtggcgatacgtaccgtcagcatgatgcggtcgccctctgcaggatagttagccatggagtaggcacggatggtttcttcatcgttacggcatttcaggccgagcagaccgaatttctcccatgcaggcagatactcctcgccgataagggacttgtcgatgtccttgtcgtaatccatggagaatttaggaatcttaatctgcgcataagagccggggatgaagtccatgtgctcgcccttgggcaatgccacgataaactctttgataaacgtagccacgttcttgttagagataacctcgcactcccactctttgacgccgagtacggactcgtcgattttgatgcccatgtcgcccttcaccttcacctggcagcccagacgccagtggtcctgaacctgcttacggctgaagtgaggtatttcggaaggcagaatctcgccgccgccctctacaacctggcatttgcactgtccgcaagagcccttgccaccgcaagcagaggaaaggaagatgccgttgacagacagcgtattcagcagcgtcgaaccggaagcgacttccagttccttttcgccgttgatagtcaatttcacattaccggatggaaccaagaaattcttggctaccaacagaataaccacaagcagcagaacaaccacgaggaatactccaatgcttgctaatatcaaattcatatccattgtcttattcctttcttttagatgttcaaaccagagaaacacatgaatgccattgccatcagacctaccgtgatgaaggtaatgcccaggcctttcagcggagcaggtacatcagagtaagccatcttctcgcggatggcagccagacccacgatagccagcaaccagccgatacccgaacccagtgcataggaaacggcatcggcaacgccaccgataaatttaggatcgctctcgcccacgttgatgcgctgctgcatgaagagtgacgcacccataatggcacagttcacggcaatcagcggcaggaagatacccagtgaagcgtagagcgaagggctgaaacgttccacaatcatctccaccaactgcacgatagcggcaatcacggcaatgaaaagaataaagctcaggaaactgaggtcgacgccttcaatgatggcatcgggacccagcactttcgtttgcaacaagtagttgaccggcagcgtcaccaccaacacgaaagttacggcgatacccagtcctacggcagtctttacattctttgatacggccagataagagcacataccgaggaagaatgcaaatatcatattgtccacaaaaatggagcggacgaataaacttaataaatgttccataattcttttaattaagaactaagaattaagaatcaagaatctccatacagtgacggcacaatcttcattcatcattcctcattcttcatttatattacttttcctgcaattctttatggcgtgcgcgttgataccagataatgcaggcacagagaatcagtgccatgggcggcatcagcatcaagccattgtttacataaccgatcttctgcaaaggctcgtagttcaggatgttgaaaccgagcaacgtacccgaacccagcaactcgcggaagaaagccacgataaccagaatcttggcatatcccaaaccgttgcccacaccgtcgaggaaagactcccacggaccgttctgcatggcaaatgcttccagacgtcccataagaatacagtttgtgataatcagacctacatatacggaaagctgcacgcttacatcgtaagcaaaagctttcagaatctcacttacaatcgttaccaatgcggcaactaccaccaactggacgatgatacggatacggttggggatggtcttgcgcaacaatgaaatcactacattggagaatgccgtaatcaccgttacggaaagccccatcacgatagccggttccagcttggcggtaacggccaaggcagaacagatacccagcacctgtacggtaacggggttgttcagtccaagcggagtagagaatacttctttattcttttttgaaaacaatgctcccatattcttatttctcctcattattattggttaaaaagtttttgtagctgttcagacaggttttcagcatggcatccacacccacagaggtgatagtaccgcctgagatgccgtctacctgatagtccggtttctctacttttccgttcttcacaacgccgagggcaatttcaccgttctccagtgtcttcttgcccggaaattctccctggaactgaggggttgcgatttccgcacccaaacccggggtttcgctggcatgagagaagtaaacgccgtaaacggtatccttgtcgctgttcagggccacatacccccagatagcgccccaaagacctgcaccgtaaacggggaatacatatttcgtctctccgtccacttcggccacaaacacgtgcagacggtggttttccttggcttctttctcgtaagcggtggcaaatgcgccggtgttctcggtcagcgtaccgtcctcgttcatcagcatatcgcccttgatgtacttattatattctgcatcggcatcctctacattcttgatgttgagggcggcaagaatctgcttcttcgtatccagctccacgttcttgttctgagtggcacgcagagaagaacttacgaatgccagcaggaatgcaacgataacaaccattaccgaagcataaatgatagtataactgttactattggtattcatttctttttccggtattttaattgttagacttagcggttgcacgtttctcgcggcggctgatgttgccctgtaccacacagtagtcaatcagcggagcgaagatattcatcagcaggatggcaagcatcatgccttcgggataaccggggttcagcacgcggatgatgatagccattgcgccgataaggaatccgaagatgtacttacctgtttccgtacgggcagaagttacggggtcggtagccatgaatacggcgccgaagcagaaaccgcccagcacgagatgttcgtaccacggcatgttggccattgcagtgtccggaccgatggtgttgaacacccagcccatgaatgcaccgcccacgaacacggagaacatcgttttccagcttgcgatgcccgtccacagcagcaggatggcgccgagggcgatggcaatgacgctggtttcaccgatggagcccggaataaggccggtcaccatgtcccacgagaactccggataagcgcccgcagtagcggctgctcccagcggagtggcaacggtgagcccgtctaccgtctgtcccaaaccgaagatgctgtcgcccgatacccaaacggcatcaccggacatcttcgtaggataggcgaagaacaggaaggcacgcgtaatcagggcaacgttgaacacgttcatacccgtaccgccaaatacttccttggcaaagattacggagaatgcagtggccaccgccagaatccacaacggacagtctaccggcacaatcatcggaatcaagatacccgaaaccagaaaaccttcctgaatttcttccttcttccactgggccacaacgaactcgatgcccagacccactacataagatacaatgattttaggcaatacagccaggaaaccgtaagcgaacatttcccagaaaccgccggcagcaccggtggcgtggaaatgctggtaacctacgttatacataccgaacagcagcgccggcatcaacgcaataaccaccatcgacatgatgcgtttgctgtcgatagagtcgtgaatatgcgttcccgatttcgcagtggtgttgggcacgaacaggaatgtctcgaagccgtcgaacaccgaacgaaatgcgtggaatttgccgccctcttcaaagttcggctttatcttgtcgagataatttcttaacgctttcatttattaaattgataattgagaattgaaaattgagaaataggctgcgccgtatatacttggcaggttatatcgcaatgtttcaaccgtcattttttaatttttaattcttaattcttaatttcctaagccatttcggcacggagcatgtcgagaccggcacgaacgatacgctggacttccactttggaagagcatacgaattcgcagagcgcaaagtcttcgggagctacttcgtagatgcccagagcttccatgcggtcgatgtctcccgcgatgatggctttcagcagatattcggggtagatgtccatggggaacacgcggtcgtattcgttggacataatcatatggcgttcgccacccttgatgcgggcgtcgattacatattctttcttacccatcagccaactgaaataagagcggttgacactgaactgattgaaacgcggcataatccaacccagcatttcgtggatttcatctccttcggggattacggagagctggctgtcgaaagcgccgaggaaaccgttgggggcaactttcttacccgtcagcacattaccgctgatgtaacgcaggtctttgtcggtggttacattgcctttgaaaacattggtgagcaatgcgcctacacgcaacttgcagtatgcgggtttcagcacttcactgcctgttacggctacggtacgggtgaggtctacgcgaccggtgttcatcaaacgaccgataaagattacggcttccgcgccgatggtccataccgtctctcctttcactatgggagagatgtggttgatttgtacacctacgttacctgccggattaggcccgtcgaatgcggtaagggtaacgttctttgcctgcacaagtgcggctgctttttgttttacactgatactcagataggtttttgccatgcgggacaaagcatcaagtcctgtctggaagtttgcttcctcgcccttcaggacgaactcgaagtcgggagccagcgggttgctgtcgaaggcggagataaagattgctttcggcgtcaccgtcgggtcggcgattacgtcgtacggacgttggcggataaaggcgaacataccggcttgcagcaatgcgtccttcacttcctgtgcgctcatcttggacgggtccatcttgccgaactcctcgtagtcctgctcggcggcagcctctaccacgatgttcagcaccttacgacgtgcaccgcgttccacgctcgtcactacgccgcttacgggcgaaacaaatttcaattcaggatgattcttgtcgataaacaagggtcccccggccatcacatactcctgttccttcaccaccactttcggagtgatacccgtaaaatcatcgggaaccaacgagtagaatcccggctctttcacagacataaactcttcggcagctttgcctttcaggttgatgtcaaggcctttgcgtaacttaattacatttgccatgcgtttatataaaataatggtttcattaatttgcccgcaaaagtagcaaaaaagaatgtgaataaagagcaaaaaagaaaggaattacggagaaatttccgtaattcctttcgttaacgaacacgaggttagtgattagcggttagtgattagcgattagcgatgaacggttgggaatggatatcctgcagagttatagcgcagcctactaatcactaatcactaatcactaatcactaaccactaatcactaaccactaatcgctaaccactaaccgctaatcgtttgcaaacatcgggtcccatgccggcaggcggacgggcttttgtttgaagagttccattatcttagcagggacgtatttggtttccactaccaggcggaacatgtattcgtcgaaccattcgtctgtcatgatgaggtggcctttgtagccgctgtcagcgccccaactgttttcgaccatccatttgacgggttttccgtctttgtccaggtctaccgccatcagtgtcatggcgtgggaagagccgctggagaaggtttggatacgttgtttcttgtccattccgaaggtagtgcccatgagcgattcatagtcatagtttttcacatcgagcaagccgcgttccgaattcaggaacttaccgacgtcgcaggagaaatacatcatggtactgtctttcaacgaagcgatagccatttgcttgatatcctctacgggcaggtttacgtacgtccagttcttgccgtcgtagcggtggcggtcgtagtcaatctcatagcatttgtaatactcgcggctggggtcgttcatcagcatcacgtagttggtgagcagttgtttgtcaccatatttctcaaggaaagacatcggggtatgatgctccgtctccaccggattgccttgggcatcggtacgcacatagtcgaattccgtaggcggaacacccaggttcagcaccagcatgcgatagacagtgcccaacatggcggttttctctttctccagagcggcaggcttggcgccttcggcagcaaggttgcggagctggagggcgtactctttcagtttcaaagagatgagattagccatacgggcggtattctcgctgctgttcgtctccggcatggcagatttgggcacaaggccgtatttggaaacgatgtccgccactccggtgaatgtgccgccgtcgctcaacggatgtttcagtagccattccaccgtcttgtcgtccagcggtttgtcggcagtgtcgatgatgccttgcaggaagagattggatttctccaactggtcccagaagaagggatatatctccgaaaactcgaaagccgggaagccataacgtgcaagggccttggcacgcattacgttcagcccggtgaacagccagcaacggccggaagacttctggtcggtgatgcctttggaatccaccttgatagaaaaatgggtatccatatcctgcatattctcctggttgagcgccagcttgcggatgtcgttgttgccgatggcattgcgcaacgccttgtcggaaggcgtaccttgataactctgttgaatctggccgagcatggcagggcttatcccgcccttgccgtcctgcgcctgcaccgaaagcagtgcggcgccgaaaacaattacagataaaatacgtttgttcatttcattatttgttatgtatgttcgatattaaacaagatgataaacagatactttcaccacaaagcagacaaagcatacagagtattctcttatgtctaagaactttgcattccccatctaaaagccttgacaaagcaaatgtaatgtcttttttgataattttagtgccctctttagatttattatctattctattcaaaaccaattcaaataaaatagttttctttgcagccatattcgtacgatatgagaaaatacatactgagtatatttactctgatactgatactgacgactgcgtcagcacaagagcagaccgttacagctaccaacgacaccactcccgcactgaccaaaaaggaattgcgcaaacaaagggtagcccgcagaaatttccattataacatattgggcggccccagttatacgcccgatttcggcgcactgataggcggaagcgcgctgatgactttccgtatgaatccaagcgacaccacacagttgcgttcggtgctgcccatgtccatagcctatatgttcaaaggcggcgtcaacctgatggtaaagccgcagctcttctttaaaggcgaccgcttccgcatcttcggaaagtttgtctacaagaatacggaagacaacttctacggtatcggttacggcacgaacaaagattacgtccgaagcgacagtaccagcaaataccgttacagcggcatacaaatcaacccgtggttcctgttccgcctgggagaaagcaacgtctttgccggcccgcaggtagacatcaactacgacaagataagcgaccctgccaaacatctcatcgaagagcccgactacgtggcagccggcggtacggccaacggctacaagaacttcaacgccggtctcggtttcctcctcacttacgacagccgcgacattcccgccaacgcctacaagggtatatacctggatttccggggcatgatgtacagcaaggctttcggcagtgacaacaacttctaccgtctggaactggactaccgccagtacaagtccgtaggccaccgcaaggtattcgcctggaccgcgcaaagcaagaacgtattcggcaacgtccccctcacccaatactccctgaccggaacgcctttcgacctgcgcggctactacatggggcagtatcgcgacaaatcctcgcacgtcgtcatggccgaataccgccagatgataaacaccgaccgcagcaactggataaaacgcctgctgcatcacatcggcttcgtggcctggaccggatgcggtttcatgggccccaccatgggcaagattgaaggcgtattgcccaactacggtgtaggtctgcgcatcgaagtccaaccccgtatgaacgtgcgtctggacttaggcaaaaataccgtaaacgaccagacgctgttctatttcaatatgacggaagcattttaaataactgacgggcagccgttagcgccatacggcataataagacagtctgcccgtcagcaatcatctaccatttacctgccaatcactaataaattcttcctttttcttgcaccgccaaaagattatccatatttttgggcattaatccccctgctcccgaaatagaaatataagaatctgatacggatgaaaatttgcgaaactgtcttttggataagtttactcgttatattctatacatatataggctatggaatgcttctttatgtcctggtcagactaaaggaatgttttcgtcaaacacctcccccgcccctgccggcagactgcatgcttcccgaactgacgctattcattactgcctataatgaagaagatgtcgtagacgataagatgcgcaacagcctttccctggactatccggcagacaagctgcacatactctggataacggacggcagcaacgaccgcaccaacgaacgtctctcgcactggccgcaagccaccgtgctttatcaaccccaaagagagggaaagaccgctgcactgaaccgcggcatccggttcgtcaccaccccgcttgtggtattcaccgatgccaatacacacctcaaccgtgaagcattgcgcgagattgtacgcgcattcgccaatcccaaagtaggctgtgtggccggagagaagcgcatcgccttacaggacaaagacaatgctgcatccggcggcgaaggcctttactggaaatacgagtccgccctcaagcaactggactcccgcctctactctgccgtaggagcagccggagagttgtttgccatccgtcgcgagctgtacgaggagatgcctgccgacacactgctggacgacttcatcctctccctgcgcattgtgatgcgcggatataccatcgcttattgcgccgatgcctatgccgtagaaaacggttcggcagacatgcacgaagaagaaaaacgcaaagtgcgtatcgctgctggcggcttacagtccgtctggcgtctgcgtgcattgctcaatccgctgcgctacggtgtgttttgttttcaatacatatcccaccgcgtactgagatggtcgcttacgcccgtactgttgttcctgctgttccccctcaatacgattctcatttttacgtcaaacacccctctgctctatgccgtcatttggttgctgcaagcactgttctacttcatggcgagctgggggcattacctgtcagcaaaacgtatcaagaataaaatactctttgttccttattattttcttttcatgaacattaatgttgtccgcggcttcaactacctgcgcaaacggcgggggcaggccggcggcgcatgggaaaaagcacggagggcataaaacaagagaactatgaaaaacatcctgaaaaacgcggagaatgccgaaaagctgctggagctgacatcggacaccatgattttattggacagaaacggcatctgcgtggacatcgcagtacataacgcagacttgtggtttttgaaagaaaatcagttactgggcaggaacatactccaactgctaccgtctgttacctaccggcaggtttaccccgaattcaagaaagtacttgcgtacaaggaagtttccgcccggaactacgaactgactatcggcagcgagacctacttctttaagtgcatcatgcgcccctacgaagatatggtgctctgccaataccgcgacatcaccgaacgtagccagcgcaaacgggaactggaaaagaaaaaccacgaacttaatgaaatacagaaagccgccctcatcggaagatggaaatacaactccggcaggcaatgcttctactacaccggtcactccggtgtaatgtgcactgcagaggaacaggaaattccgcttcaggactacactatgtacatcctgcccgaggatagggaaatattcggcaagtggctggcacagaaccttcagggaaatacagaaaacagcatagactaccgcatccttttcaagaaacggatattctatatccgcctgaaaaccttctcgcacgaaacactccccgacggaaccggcattctggaaggctacatacagaacattaccgacatccagcaacggcgcaatgacatcaccctgctgacacacgccatcaataactccaccgaagacatatttgccgcccgtgaagacggtacgctcgtctttgccaaccgccgtttccgggagcatcacaacatcagcataacggacgacgtcagcacactgaacatctaccggataaacgcaaatgcacaacaagacgagaattcctggcaaagattaatcaagtcactcagaaagggagaaaaacgtaacggcttcatcctctaccatcccctgcccgaacaccccgaagtgctggctatggaaggaagtgcctattgggtgacaagcgacaaaggcgaggccatcctatggggattcagccgggacatcacccaacgcatcaggaacgagcagcaaatcaaacggttcagtcagattctggacaaaaccattgaaaacctgcctgccggtatcgttgtcaaggacatccaaagcggctttaaatacctgtaccgcaaccgcgaatcgtacaaccgcaacatcccccttaaagaggcattgggcaaagacgatttcgacttctatcctcccgagctggcacaagagaagagaaagcaggatgttgaaatagcccggaccggaatcgagaagcattggattaccgaagagcacgaccagaacggtaaatccatctttctggacaaacggaaggtgcgtattgaaagcaacgacttcccacccatcctattgagtatcgaatgggacatcaccgaaatggaacggatgaaacgggaactgctcgtggccaaagagaaagcggagacttccgaccagttgaaatcggctttccttgccaatatgagccacgagatacgtaccccgctcaacgccatcgtaggcttttccagaatcattgccgagagcaccgatgccgaagagcggcaaaactactacgacatcgtggaagccaacaacgaaagacttctgcaactgataaacgaaatcctggacctctccaagattgaagcaggcatcgtagaattcaccatcaccccggtgcgcctgcacccgctctgcaaggaaatacacgacgcactgaaattccgctgtcccgaaggtgtggagcttgtttacgaagcctcggacgaggagattaccgttgaaggcgacaagaaccgcatcttccaagttatatcgaacctcatcggaaatgccttcaaattcaccacaagaggcagcgtcggctacggataccgccgcaaaggaaacgaaatagaattttacgtcagcgacaccggcatcggcatccaaactgacaaactggcaaaggtctttgaacgctttgtaaaggtgaatacctttgcgcaaggtacgggattgggactgtctatctgcaaaaccattatcgaacgattgggcggaaccatctccgtctgttcggaagtggggaaaggaacgacttttacctttaccctgcctctggcaaaagacaaaagggaaacagcggaggaacagaactctgtatccgaaaccagcttcaacactcccggcaatgcagaaacaggcaacaatacttacggccttaatgaagaaacgcacgaacaccaagcgacacaaacaaccggagcatcccgggacacccggcagcccactatcctgatagccgaagatacggacagcaactacatccttgccaaagcaatattaggaaagtcataccacctggaacgcgccaaggacggcatggaagccgtaaccatgttcgaggagctgcatccggatttaattctgatggatatgaaaatgcccaacctcaacggactggacgcaacgaaaatcatccgcgagctttcgcccgggatacccatcatagctcttaccgcctatgcctacgaacatgacagacaagcggctctcgatgcaggatgcaatgatttcctgataaagccctatacgcaggagatattgaaagaactgataaataaatacctgaaacaaacaggtgtgtcaagcccggataggccttgacacacccttaccaatcattatgcaaagatatcgctccgctggatatacgctatgacgtctcccttattgacgttggcgccttgctgggcacatacctccacaacacggcccgtaaagccggtcattaccttttcgtactcgccccacggtgtagagacatagcagaacacctcatcgtgctgatacttacgcccgataaacggcgctgaggacggaccttccacggaaacctcccaaagcacctgccctttggacggggctatgataggatcggctttggcgcgtttcagcttctttatctcctcttccgaatatccgctctttgccatggaagtgtcctttacgcgctccagctcgtcgcggaaacgcttcttggcaacgcccgacttatagtcacggtactgccggtcgtgcatagccagctcgaagagctcctcgtcgtcctcgccatactcccatccgttttcgtccatctccttgcggtattcgtccaaagcatccggatagttggactgtgggtctgtgtcgacaaattcgtagcctttggatttggcaagctccacgatttcgggagccagcttacccggcaggcgtccgctcttgcccagaatcatatcccacgtatggttgtcaatcatcgtccagcgttcttcgcctttcaccagttgcatcacgttcatcagcgccacgttcttgacgtactggctgaacggggtcaccaaaggcggataacccagcttgggccatacatattccacttcatcaaaaagcattaccagcaggtcgtctatgctgagttcgggctggttcttgcttttcagtatcatgttgataccggagtgcacgcctttcaggtctgccatcatggaacccatcataccgcccggaagtccgcacttcaggagcagggacgacatatgcttgttggtggggtcgataaagtaaccgaggaagtcgtctatgaattcctgcgtcatggcacgtgctttcatataggctttcatgttgatgtcgggcacctggaagcctttatcgcgcagcatggcctgtacggaaataacgtccggatgcacctttccccatgacatgggctccatagccacatctattatatcggcgccgttctcgcatacttcaaggatggatgccattgaaagtcccggaccgctatgtccgtgatactgtatcaatacatcgggatgcttctccttgatagcctttgtcagctcgcccagcatacccggacggccgatgcctgccatatccttcaaacagatttcgggtgctcccgcctcaatgagctggtcggcaatgtgtgcatagtactctaccgtatgcacgggcgaatgagtgatgcagagcgttgcctgcggtatcatgcctgcctcgagcgcatagcggatagaagggatgatgttgcgcgtttcgttcagtccgcagaaaatacgggtgatgtccacaccttgtgcatgctttaccttatacatcaggcggcgtacatcggcgggaacggggtacatacgcagcgcattcagtccgcggtcgagcatgtgggtctgtatgcctgcatcattaaagggtttggtaaaggcgcgtactgccttgttggggttctcgccatagagaaggttcacttgctcgaaagctccgccgttggtctcgacccgggcaaaacaccccatttcgattatcaacggtgcgatgcgtaccaactggtccactcgcggctggtatttaccggacgactgccacatatctcggtaaacaagactgaatttgatttcttttttcattgtaataggtaattagctatttgttcactcggttaacttgatatatacaaatataaaggattattctgacatatagtcaaaataatcccataaatattcacttgaaagatatgttttatatcatttggtaaattgggaaataagaaattgaggaacaagggacgcaacgtttgacttgagacatccaaagtggcactttagaagtctaaagtactacttggcgattctaaagttctactttagactgcccgtatcgcaccctgtcttttgcggactctttctcttcacacattttctttcacctcaccgctgttttcctctttttatccgtcacacaatccgctatgctccttagagaaacagccccaagaactcccgaaagaatgccgggcagaaaccggacagactctaaatgaagtccttcaattcttcctgcagtttctgtcttgtaaagaagatgcggctttttaccgttccgagggggagtccgaggcgttcggcaatttcgcggtatttgaatccggaaacgtgcatggagaagggcactttataatcgcgcggcaatgaattgacgatgcggtgcatttctttcaggtcgtatgcgccttcggtactggcgaaaccggaatcctgcggcatgctcaggtgatacaggttatcggtctggtctacgaaagtctgttcacggactatcttccggtagttatttataaagatgttacgcataatggtatacatccaacctttaaagttggtgtcgggttcatatttatcctcattgtccaaggctttaagagaggtctcctgcaacaaatcattcgcttcttcccggtcggccgttaatttgtatgcaaagcgaagcagttcttcttgcacggcaagtaaatcttttctaaaactgtaagtattcatactttgctaattttttaaaatggttaatattcgtttcggtttagtggttgcaagtatacggaagtttccaagtcctgagggctggaatacgggtattctttggggtgaaaactatcatttgacagatttcaccccctatcttgacagttttcaggtgagataaagcggctggttttcagcaggaagtacaattttgactataatcggcgtacgattttggctataatttatgccaatattaccataagataaacaaaatacagccatatgagttatgagaaagaaatagtatgaggtatgagagagaaggtataaagtataaagtcacccctctttctcctgcccttcctcatcgttgcccgagagtatgggcaggcaaatcttatatttcacggccagaatacgggtgatgaacacggatatcccgcctatcacctggcagccgtaagactgcatgccggcaagcccgcaaatccaatacatcgtaccgcccactacgcacgccatcgcataaatctccttacggaatatgagcggtatctcattgataaacacatcgcgtatcacaccgcccgcggctccggtgatgctgcccatgataatggccacccagaaaggatagcccagcgccaggctcttgcccacgcccaccaccgtaaacagtgccagaccgatggtgtcgaatataaagaatgtattgtgcagatggataaggtgctttccgaagaagataacccacagcaatgccagtccggtacatatcagataaatggggtcggtcatccagccgggagtcacatccagcagcaggtcgcgtatcgtaccgccgccgatggccgttacgaaacccacgacgtaagcgccgaaccagtcgaaacgtttcgccgaagccagccgtatgccgctgatggcgaaagcaaatgtaccgataaagtcgagtatctgaacaaatgttggcatgagagcatttcttttttttgcaaagtaacaaataatttccctaagaaagtgtatttttgtaccgccaatttatatcagcaatgaaaataaccatcgtatcgggcgcacgccccaactttatgaaaatcgctcccctctgccgcgccatagacgcagccagagaggcaggtaaaaatatatcctatcgcatagtctacaccggaccgcaggacgacaccaccctggacgcctcgctcttctccgaccttgccatgcgcaagcccgacgcctatctgggcatcagcggacgcgaccactcccaggtggcagccgccatcatgctggccttcgagcgggagctcgacgaacaccccgcccaagtggtgcttgtggtggacgacatgaccgccaccatgagctgcgccatcgtagccaagaagcgcggactgaaggtggcgcacgtcatagccggcacgcgctcgttcgacatgaacatgccgcgtgaggtcaaccgcacgattgtagacgccatctccgactatctcttcaccgccggcatggtggccaaccgcaacctcaaccaggagggtatgataccggagtatatccactacgtaggcaatatcctcatcgacaccatccgctacaaccgccaccgccttgtacagccgctctggttctccagcctcggactgcgcaagggcaactatctcctgctcaccctgaaccgccacgacctgctggaaaagaaagccgtactcggttcgctgatgcagacagtggccgaaaaagcgggcgatatgcccatcgtagcccccatacacccgtacgtggagcgtgccgtaaaatcattggggcttgacatgcccagcctgcacatcctgccgcctcaaagctacctgcacttcggcttcctcatcaaccaggccaaaggtatcgtgaccgactccggcaatatagccgaagaagccaccttcctcgatgtgccctgcatcacgctcaacacctatgccgagcaccccgaaacctggcgtatcggaaccaacgagctcgtcggggagaactcctttgccctctccgccgccctcgaccaactgctgcacggcgaatggaagcacaccaccctgcccgaccgctgggacggacgcaccgccgagcgtatcgtacagacgttgataaacggggagaagctataagacccgcgttcggaaaaccgcataaaaaaggagatgtgcccatacaaaaaaatgctggtccggcacatctccccacactaaacacagtattgtaaaaaagaagaatagtttaagcaagtctgtccatatattatcattcggagtcattccgtatcgtacgttactgtacggcaagacaaaagtatccaattataccaaaggctcaaagttccaatccgccccattcttcctatacggcacaaatcccgacctatcctgccgatattgataaataaaaggaagaaaaaggcagcgttctcctgccggtccatcaccttgcccgtttctctgcctcttaaacatccctctcattctttaaaatatatttgcttcttgattaacagtaaattgttaactttgcagcttgattatgaaacgtatgaaacgactatataacattaccctcatcctcttgcttttactattcgcctctgccggcgcatcagcacagataagaggcgttataacggactcactcacccacgaaccgttgatgtacatcaccgtgcaatacgaaggaaaaggcgtaggaggcatctccaatgccgacggagaataccaggtggagacgcgtaaagggtggaatgaactgacattctccgccatcggctacatcaccaagaaagtgaagttcacccccggtacgaaagtgctcaacgtggcgctggcgcctgccgatgtaatgctttccgaagtcgtcgtcaagcccaagaaagagaagtattcgcgcaagaacaatcctgccgtggagtttatgaagaaggtcatcgagcacaaaaaagccctgaagctcgaggagaacgacttctaccagtaccagaagtacgaaaagatgaagatgtccatcaacgacgtcacgccggagaaaatggagaaaggcatctacaagaaattctctttcttcaaggaccaggtggaagtgtcgcccaagaccaacaagatgattctgcccatctccatcaaggagacggcttccagaaccatctaccgaaaaagtcccaagagcgagaagaccatcatcgagggtatgaactccaacggtatcgaggagttcttcaacacgggcgatatgttaggtactatccttaccgatgtcttttccgacgtcaacatctacgacgatgacatccgcctgctgcaacgccgcttcgtaagtcctatcggacgcggagccatcagcttctataagttctacctgatggacaccctcatggtggacaagcaggagtgcgtgcacctcaccttcgtgccgcagaacccgcaggacttcggtttcacaggacatctgtacgtagtgaaagactccacctatgccgtaaagaaagccgtgatgaacctgcccaagaagacgggtgtcaacttcgtggagaacctcgacatcgtgcagcagtttgagcaactgcccgacagcaactgggtgctcaccgacgacgacatgaccgtggaactcgccctgatgaaaggcatacaaggcctggaagtgcagcgcaccaccaagtacagcgactataaattcgatgagatagaaccccgcctgttccgcctgaaaggcagcgtcatcaaggaagccaacatgcttgccaagagcgacgaatactgggccaaagtgcgccaggtgccgctcaccaaaaaggaaagttccatggacgtgttcatgaaccgcatcgaacagataccgggcttcaagtacgtcattttcggtgccaaggcgcttatcgagaacttcgtggagacgggcagcaagaagcaccccagcaagttcgacttcggccctatcaacaccatgattaccagcaactatgtgaacggaacccgtttccgtctcagcggcatgaccaccggtaacctgcatccgcactggagcttcagcggttacggcgcctacggcacgcgcgacaagaagtggttctactccggacaggctgcctactctttcaacaagcgcgagtacgtcctttgggaatttcccaagcactacctcgccttccagtacacctacgatgtgatgtctcctatggacaagtatctggctacggacaaggacaatatgttcgtgggctggaaatggactaccgtagaccagatgtcgtacatgcgcgacgccaccctgacctacgagctggaaaccaataccggcttctcggtcaaggccatggcgcgccaccgcaacgaccagcccgccggcatgctgcaatactggaagaacaacggcactacccccggcgaatgggacgagaagaataccctggtgcacgacatcaccaccaccgaactcggagtgaccctgcgctactctcccggcgaaacgtttgtcaacaccaagcaacgccgtgttcccgtgtcgctggacgcccccacgttcaccctctcgcacaccgtcggtctgaaaggcgtgctgggcggcgaatacaacttcaacctcacggaagccagcatccgtaaacgtttctggttcggttcgtggggtaagctggacgttaccgcccgtgccggcgcgcagtggaacaccgttcctttcccgctgctgaacctgcccatggcgaacctctcatacatcactcagaacaacgaatcgttcaacctcatcgacaacatggagttcctgaacgaccgctacgcctcgctcgctctcagctacgacatgaacgggaagctcttcaaccgcatccccctcatcaagaaactgaaatggagagagatgttccgtatccgcggcatgtggggcacgctcacggacaagaacaacccctacaaaagcagcaaccccgacctcttcctcttcccgatgcgcgacggcgtgcccactagccatgtcatgggcaagaccccttacatcgaagccagcgtaggcatctacaacatcttcaagctgctgcatatagaatatgtgcgccgcctcacctataccgacatcccgggggtgaagaaaggcggagtgcgctttatgatattgatgattttttagttagtgattagcgattagtgattagtgatgagcgaggagcggttatatgggagagggaatattaaaaaacaaatcaatgaactttgctatacgcattgtgaatttatataatttcttgaatgaaaccaaacaggaaagaattatgtctaaacaaatactaagaagcggtacatctgtgggagccaatatcagggaagggcaatttgccgagtccccagccgactttatacacaaatattccgttgctcaaaaggaatgttcagaaaccctatactggctcgaattgctaaataaaacaaactacatcaccacagagcaatatgtgtccttggataccgattgtacggaactgatgaagatgataacctcttccatcatcacccgtaaaaagaatctgccccctaatcactaatcactaacccctaatcactaaccccatgcaacctttagcagaaagactcagacccaagacattagacgaatatatcgggcagaagcacctggtgggaccgggggctgtgcttcgtaagatgattgatgcgggacgtatctcctcgttcattctgtggggcccgccgggagtgggtaagacgacgcttgcgcagattatagccaataagctggagacgccgttctacacactcagtgccgtgaccagcggtgtgaaggatgtgcgcgatgtgatagaccgcgccaaaagcaaccgcttcttctcgcaggcaagcccgatactgttcattgacgaaatccaccgtttcagcaagtcgcagcaggactcgctgctgggcgctgtggagcagggaacggtgacgctgataggcgccaccaccgagaatccctcgttcgaagtaatccgcccgctgctctcccgctgccagctctacgtactgaaatcactggaaaaggatgacttgctggaactgctccagcgcgccataaccacggatgtgcaactgaaagaacggcagatagagctcaaggagactaccgccatgctccgctacagcggcggcgatgcccgcaaactgcttaatatcctcgacctcgtggtgcagtccgaaaccgcagaccccgttgtcatcaccgacgagatggtgaccgaacgcctccagcagaatcccctcgcctacgacaaagacggggagatgcactacgacatcatctccgcctttatcaagtccatccgcggcagcgacccggacggagccatttactggctggcacgcatggtagagggcggtgaagaccctgctttcatagcccgccgtctcgttatctccgcttccgaggacatcgggctggcaaaccccaacgcactgctgctggccaacgcctgcttcgataccatcatgaaagtgggctggcccgaaggacgcatcccgctggcggagacgaccatctacctcgccaccagtcccaagagcaactcggcctatatggccatcaatgatgccctcgaactggtgcggcaaaccggcaacctgcctgttcccctgcacctgcgcaacgcccccaccaaactgatgaaacagcttgggtatggtgacaactataaatacgcccacgactaccccggcaacttcgtgcgccagcagttcctgcccgacgaactgaaagaccgccgcatctgggagccgcaagcaaatgccgccgaacaaaagcataaagaaaggatgcaggccctgtggggaaaggaaagattttagaaatggaaattctgcagaacaacattagaaacaacttataataacacttatgaaaatagtagtcctcgacggctatgccgccaaccccggagacctctcctgggacgaactgaagagcctgggcgaatgtaccgtttacgaccgtaccgcccctgccgaagtgcttgaacgtgctgccggagcagacatcctgctgacgaacaaagtagtgctcgatgcaacaaccatcgcagccctgccccagttgaaatacatcggcgtacttgccaccggatacaacatcattgataccgccgctgccaaagaacggggtatcacggtcaccaacatcccggcatacagcaccccgtccgttgcgcaaatggtttttgcccacatcctcaacatcacccaacgggtgcaacactacaccgacgagatacacaaaggccgttggaccaacagccccgatttctgcttctgggacactccgctcatcgaactgagtggcaagaaaatcggtatcatcggtcttgggcaaaccggctacaacaccgcccgcatcgccatcggcttcggcatggaagtacatgcatacacatccaaatcgcctttccagcttcctcccgaaatcaagaaaacggagctcgacgaactttttgccaactgcgacatcatcagcctgcactgccccctcaccgactccacccgtgagctggtcaatgccgcccgcttgaaacagatgaagcccaacgccatcctcatcaacaccggacgcggtccgctggtcaacgagcaagaccttgccgatgcactgaacaacggaaccatctttgccgccggactggatgtgctttcacaggaaccgccccgtgccgacaacccgctgctcaccgcccggaactgctacatcaccccgcacatagcctgggcaagtgccgccgcacgcgaacgcctcatgcaaatcatgctggataatataaaagctttcttggacggaaagccgattaattcagtaataaaataaccagcaaaagggtgtgacgaaagctctggcaagcttgtagccggggctttcgccacacttttataaaacacacccgcgttaatcatgggaaaaaccgccgtcaaaggtctgtttcatctgatactgatagctaccacatttgtactggctgttgtcaccatcatcgcatcccgttccgggcattaccatccggaacattccaccatcatgcccttgctgggacttgccgtaccggtactgctggtatcctgcctgattgttgccctctgctgggcattggcacgcaggaaatgggcgttcgtcacgctggcagctttcttcttcaactgggaatacctcacagctgttatccgtttcggttctcctcaggaagtacccgccaccgcaacggcaccgaaccgacaaggcgaaaacagcggttacctcaccgtagccacctataacgttcataacttcggaaacgaaattaccggctactcctgcaagcagattgccaagtacatgcagcaacaacacgtcgatgtactctgctttcaggaattcggcgaaaacaaacacttcacggcagacagtctgcgtcgtgccctttcccactggcaatatgccattatccctgcagacgactccatccgcggcatcctccccatcgccgtattcagccgctacccgcttatcggcggacgtttcatcacctaccctcacagcgccaattgcagcatgctgtgcgacatcattctgaatacagataccatccgcttgctgaacaatcacctgcaaactaccagcgtcagccagaaccgtaaaaaatgggaacgcgaacttgccaccgacaatacacgccgtgaagcgcaagccgtacaggatgcagcggaaaccctgcatgaaaacttcgtgaaacgtgctttccagaccgacagcatctgtcagctcgccactgccagccctcaccccgtactggtgtgcggagacttcaactccctaccctcatcctacacctatcaccggctctccgagagcctcaaggacggcttcaagacaggcggacacggctacatgtacacctaccgttacggcaagcgcatgctacgcatcgactatgccttccactcaccggagctggaatgcaccgactactactctcccaatctggatttatgcagtgaccacaacccggtgatattgacggtgaagtattaaaagacgattccacccctccactctgccataccgtatttcctcttacgctcaaggtacaataaaaaaatagagctgccccggtttcccggaacagctctaccgtaaaaataaacatgaacaaaaatatccttagaacgtcaagcggatacccacctgggcatgccagcgtgaggaaacatcgctcttggtgatttcggacttgttgtaaatatagttaggagtggtctgaccgtccaccgttgtcagtttcgtaacggaaatcggtgaaaggttatagagtgaaccataggttgctccccacttcttgttcaacatattggcaaagttgataatgtcgaaagtaaattccagtttgcccaaccccttaggattatagatggtctgagccagatggagattgatttcatgttcccacttggtgaggttggaattacgctcggcatactgtccgcgatgatccttggcataagcatcaccttcaatccactgtttgaaagcttggcggctttcttcggcagtcatggttacttctccttttttgtttgtagcgtccacgaacttcatcttatccaactcttcgtcagtcggaatatacagcagggagttacccttctgtccgtcgccgttgaagtcggaagtttcattcatggtcaggctgtaacggtttccggagaatccgttgtagataacagagatagaagtgctcatccagttgttccagtatttcggagtggtgtaagccacctgagccattacgcggtgaggaatatcgaacttggagaaacccagttcattaccgctgttggtgtcgcgggagtagttgtacttccagttagagtaggcaacggaagaagttccgtcgtttacagacttggagtgtccgaaggtataagatgcagacatgtcaagaccgaacccgaagtgtttctccaacaaggccgaaagagcatagctataacccttgtttgtattcttcaggttgataatagagtaatagtcacccgcctgtaccttataagaaggagaagcggaagcctctacacccggaacggcatacacctgtccgttttccacaagagcaagattctcgaagaatacattattcatggttttggagtaaacaccctcgagagtcattttcacatcacccggcaagaactgttcccaagccagattggcacgcaacacctgtggatacttgaacttcttgtcggtagtcacgatatcctgcttcatgcttcctgtagcggcagccagcggattatccttgtattctcccaatgaaggagcttcattggtatcgttcttgcccgattcatccttgggctggagagtagtacctttctgttccatacccgtattgttgaacgagttactgagccatacaaacggtacacgtccggtaaagatacctacaccaccacggataagcgtgcgatgttcttcgtcggtataccagctaaagcccacacgcggtgaaaccatcagcttggcactcggagtttcgcctacgcgcacacccatattacgtccggttgcaaagtcgttgaaagtaggattcacagtaggtttgttgaacagcagaggaatatcgaagcggataccgtaagtgaagttgaagtctcttgacactacccatttgtcctgagcatagaaaccaaactggccagctttcataacaggagcatatttcaggttaccacccgtcatgtcggggtcactgtacttgtaagtaaacttgtagggcttgtcttgcaggaagtaatccaaagagttatagtaccatgcaccttccgaagcctggataaacaagttgctgattttgtagatttcgttgtgagtaccgaaagtcagtgtatggttgccaagataccaagagagattatcctcaaagctatacacatcctgattcagcttgttggcaccggaagagaactccgtaccgatattggctgtaatcttagtttcaccgtcaccgcctgtgacattgctgatttgtacgcaaggacctgaatattccgtatcgcggaagtcgcggacaaacgtacccgacgcacgcaactcgttgtagaggttatctcccagacgagagttcaactcggccactaccgaattcatcttgttgttcatgcgataaccgctgttgccgaaatagtaagtggtggaatttgctccgtacacatctttataagagttgttgtgctggtagcgtacggcaagtttatgcttttcgctgatattccagtccacacgtgccagaagaccgaaagatttctgttcgatatcacgttcaccgtaagtttcttctataccggtgagcttcttgtattggtcagcaatcagcttggcagtggcgctggtgatgtaattagtggtatatcccggataagtgcttgagggatagctgttcttcttaccttctgcactgacaaagtagaacagtttgttcttgataatggcaccacccaacgtaccaccgtaggtacggtcgaactgctgggacatcggcgacttttcgtaaccgcgtacggcactatacttgccatacatattctggttgttgaaataagtgtaagcggaaccgtgggtttcgttcgtaccctgcttggtgatggcgttgataccgccgcccgtaaatccgctttggcgaacgtcgtagggagccaccactacctgaatttcctgaatggcatccatagaaataggattggcgcctgtctgagcaccgttcgtgccaccggcagaaagaccgaacacgtcgttggccaccgtaccgtcaatctggaaactgttgtaacggttgttggagcctacgaaagtgataccgccgtttttggaagtcatagccaacggactgttcttcacgatgtcgtagatgttacggtctacagtcggagtattttcaatagagttggcagagaagttggtagcagcaccgctttgtgttttggcatcggctacgacaaccacttcatccagcaattccgaactggggtgcagttttacgttttgtgtataagtgttacctaattccaacatgataccggtgaacactgcgctctgataacctacataagacactgtaagcttgtacggaccacccgtacgcataccctgaatcgtataacgtccatccacattggtaatagcaccgtactgtgtaccggaaggctcatgaacggcaacaatcgtcgctccgattaccgtctcattctgttcgtcggtcaccttaccgctgatagcggaagtcgtaacctgcgcatttacgcccgcagccgtcagaaccagcataaacgtaaaaataagtcttaatacttttaacataatagtttttaattagtttcttaaaatgttatatttttgaaaacatcggcaaagataagcaaaataatatataaatacattacaatcatgctacattttttaagaattaagcctgattttatttgtcgcataaccgacccgccatgcttcttataaagacaaacaatactatgccatcctctaccaccgccttttcttcttgcaggctttctgcaatgccacaccgaacaggcagcaagcacatttcaattcttttggggagagtttatccaaattgtcgagaataccggaaatcgagtagtttttatcaagaaactcataaggatcggcggcttcttccaaatcctgctttatcaggcaggtgcatagaggacttttatccattagtttattttttggggttatgtaaggggttatcttatctgctttacaaaaacatgtttgggaaacacccgcatcgaaaaaatgcacctcactccccttacggaaagaaagatgctcaaagataacactttttgctattatttgcatgattatggataaataatacaataaaaagaagaaatgacccgcatgacagaaacattacctgatcttacttatcgttatcaaattttgaagcctgtaaccaccgcagcaacagcttgtaccgaatttgctaagagtgagcaagaacacctcactgtataacaatatcatccactccgagtactcgtaaaaagtttactactgaactatctcaatgctcaagtagtgatatatcacaatccaaatcctaacccgaaaggtaacggcaacaaacatatcctcaaaaagagacgcggactacaccgactccacgaataaaaacatctcgtgaaatccgcgtaatccgcgccttttcaaatctctgtctgacagcttatatcagcaatatgctatacagccgctttctgcaaagagtcttcaacgtattcgaactttcctttgccaatcactttatactgtatggtataggtagtggtagagctaccatcgtatataccgaagtttatcgtataaattacgtctacaccattatcggctggtgcagcatcagcataaaggacttccagtgcatgcgggaaggcttcgggcagacgctcccacatcagtgcagtgatttcatcggaagacatgccatcgtacgtgccctgtccttgccatgcgcttacgcggaagtcgaagttgttctgataagccgaaccgccgtaatagtaatcattattgccataagaggttacgtattcagaatgattctcttttacccaatccgtaatggcctgatagaatgcagatacttcagcattatttttctctacgggcagattgatgaggatgctcggagaatacaaccattccgtaccgttgtaagcgtaaggtcttgtttcaataacgatgttgtcacagtattgccatacgttaacggtgtcgttgtagatgtactggtcggcattggcctggtatttaccactacctgcataataacggtagattacggtgcaagtgtcgccgcctatcgggtaaagcagttcatcggcattagtcaaataacgcggaatgtagttttctgccttgacggtagaactgaaagaatagtccttacccggttgtccgtcatcagtacccatgctcgtataatcatccaatgcaataaattgtgcctcagcagagtttttaaagagttcccacttgttctttttacgttcatacaaagcaaaacgcagttcagtattgactacagtaggaatgtccttacccactacgatattgtcaatctgataactggtagttttaccttcttccggatctcctgtatagtggaaagcaatatgaatagtcttatccgcataatcatccaaattcatgatgcctgcttgaccaaagtctccccagttttttgcaggttcttgaggaattgtaaacttacttgtcacatcatcccaagtcgccttagttacatccttaccgtcaaaatcggttgaaatgagtacttgcaagccgtcatgtttccaatatcctactttaacatcccatgcaaacttcttgtcggctccttctactttaatggcaggagttaccaaccaagcttccgcaggaccgtcagccttgttggctgtaaattgcagatacttattcttactgtattcgcctacagtccatttattacctttagcactgatgtaccaaccggatattttctccaaatcacccttggtcaaatcttcaaaatcgtatttggcaataggggtttccactttttccggtttagcatccttattgtactgatactctatgaaagagaatgcaccgtcctcggcatcagcatacttttcattcagtatcttatacattttactttctgtatcctcattcagataggctccataatacccttctccatgaataatagtataatcttcttctgtgagttgcagatacggaatatcgttatacttggggtataccgtcttgaaacgatacgtaatctttgctgaggagttcaaatccgctcccaggtaagttttggccaaccagtccggtatgtaatcatcaggcatggcatcagcagagaagtatttgttcttcttcacatccttgcccatcgcatcgtaatcggcatcggtaagcgtgtaaacaatcttggcaacatcagtaggacgcccaccttcatcgtaaccagggaagttgtcctcgttgtaatcgcagcccgtcatcagaaaagcggccgcacacaaactgtatataaactttttattcataatcgtagttcttaaaggtttagaaattgaacttcagtcttacggagtaagtacgtccaaagccgtagagtacacgtgtagccgtctcccagttgtggctgccgccatcacgggcatcagcgatgtattcctggtcgaagaggttgttgacgttaccgctcagtgtagcgcgtaccttaccaaagtcgaaagagtatcccgcactcaggtcgaacgtgctgtacgagggaatctcccatgggctaaccactacgatttcatcgccgaaaccggcattgcctgcatcgatgtcatagtcggcaaagttacgcgcaaagaagttccagtctgccgaaatacgcaatcccttcataggacggatgttcacgcccagagcggccgtagtctgcgctgaaccgcctacgtatacattatccattttaatattggccttgtagttggaagcttgtgacatatcagccaatgtaccacccttgaagtctgtcatcaactgaccggcagcattgtaataatatccgctggcattaccgttccaacgccagtcaccccaagagaacataccgttgatgtccaaccatctcaacgggcggattgcaaagtcaagctcaacacccaaatggttggcattggctccagtcatattcaaggtataacgatccttgatgttctgtccatccacattatagtcaaaatcgccagaatcatacaaagccttatccatccaacgggtgtaataggcattgaggttggctgtgaatatgccgctacgatagccgtaaccaacttcgaaagacatgattttttcgttcttggcatcttcgttgcgggcatgagagttttgcgaattaacgaaagaggtatcgaacattggagcacgggtgatgaaaccagcattgatgaacacgttattcttttcattaagattgtagttaacaccaccctttatgtttccacccaaatagttcttggtatcggatttagccttgtccttgctatagtacatacgatcgtaacgccaataaccggtgttggaaagaccaccggaaacgaatgcgctgagcttgtcgcgattgtactcaagctgtgcgaatgcgccctcggacattacaaaaccatcgtagtcgcggtaatatacatcacccacacccaacttctggttcttgaaattggggtcagcagctgccggattattctcggccaaaattttaccacgattttcagcatcgataaaatagtcgccgccgaaaaggtctacaatgacattctgatgcaaacctttataatagcgtaaatcgataccgccatagaagtcgaagttttcaccaaacttggtggtataagtagaaagcaatccgtaccacatgtggttgttcatagacttacccataatcatcttggaaccagtggtgctggtttcattcaaagcttctacctcgtcgtaagcgaaagttccgtctgcttcgcggaaatcattgttcaccaatccgttacttgcaccataccaacggctacggttggcagcgtcacccgaaccgctgtaaccgttaccacgaccgatggatacgtacaatgccgtactcaaacttgatttgcggtctatctgccacaagtggttcagtgaaatctgcggtttatgataggagtttctggacgagttgtatgcctgcccatttctgtaaccgaaagtcgggttgtatctataagggcttttctcacccatatatttctgcacgcgctgccattccttgatggtgagtccgttctggttgttgcgctgattgtgccactgcggagcaccgaacgcagtaagagacaactggtgattgtcgttgaaacgcttagcgatgctggcaaaccagttgtaaccttcgaaatccgtaccctggatgtatccgtcgccccaggtcttaccacccagcaacgtgaatgcccagccatctttggacagaccagacgatacgctgaaaaggattttattgtaaccgtcgttacccatgccgtaagatacgaatccgcctctcttggcttccgtactctttgttacgatgttaatagaaccgcccactgccggaacagatactttggcagcacccaaaccgcgctgtacctgcatgctacgggttacatcggacagtccggcccagttggaccagtacaccttctgattctccataccgttcataggcacaccgttaatcatcatagccacgttctcactcttgaaaccgcggatacgtgtttgggcatcaccataaccaccaccgtctttagtggtacctcaaatccgcaactacgcgcctaatatgatacagaagcgaaaagaatctgcatcgttagtaaaaagggggcacagtgcatcgaatgtcaccataaagacatataaatgccccttaccccaccatgcgacttgaggcaatacgcaaaatcacgactataagttgtcggtgttatccaaagtcattctggaacacattggcataagcattgttgcatgaatagatattcagcacatacttccttgatgtcctgacccatttggctggcacagagatgaacttaaagacaaacgtcttgatgcggcttgttgctttgagtccgaacctcttcacgtcaagcctcgccatgatgaatttatagaagttgcgtatgagtgccataagcagaagaaacaccgtgttttctcccataaaggattttggaagcctgttccagccgaatccgttattcatatcatcgaagatgcgttccttccctccacggaggttatagaattcgacaatctctttctcggaagactcgtagtcatttgtaaggatgcagcggtaggtgtattctccttcccacaggtcgagttcgccgtctatccgcttctgtctttgaatcacaagacggtatgccttccctttccatttctcgatgagaatggaggccagctcaaactcaatgccgcccaattccactttcttccaacctctgagggcaaagatgtcattgtagagcgaactgcatcggttagcacggatatagaaggtcttgcagtgtttagcaatctcttccactatctcttcagaacacgagccgcaatcagctctgaaacggttgataataagcttgttttgttcaaacctttcaaagaacctcttcagcgtgtccttctggtggaaacggacatttgtgttgccgtcgctgttctcaatgccgacaatcaagttgccaataaccgccacgccagggcgataaccaaggaacttcttgtatgtaggcttcgcatcaaacttctcagcctctatgaactggtggtcgaagtcaacgtcatacccctcgccctctttcagctgccctgtggacaataggcaattgaggagcagtgtattcagcttgtctgccgtgttgaagtcgtaggtcttgccagtgtcggatgtgtaggaaatgttatcctgggtcagttcctttatggctctaagaatcgtgtcggcactgcatgtgcgaagtgtcggatgaagcgaaaggtggtacatcagatgagtggtgacatcctcgatgcatgagccgccacaaaaataaacgctcataagcgaacggatgatttcgctgtattgataaccatacagcctgcatctcataccgagggttgagtcgattacagatgagagtctggagtcaaattgctccattattgaaaatattcctccaaaaggagtgagtttctcggatttaattgctacctttgccatgtctgtcgggtttgatacatattttgatttgcaacactaagataggtgaaaaatctgacatggcaaattcctgagcaactttttgttgctcaggtacttaaaaagttatatttgtaatagtgttgcggaattaaggtggtatagatacccggagtggatttcagaatttcgggaaactcctgcgaaccgagtttttcttcaatgaacaccgggtctacggtagataccgctaccggagttttacgagccactgcaacggacgatgtaatcgtcacatccgacagcatcactgcatcaggttgcatcttgatggtccccaactctacggaagcgcctttctgtgtaatctttttcttctggtctttataaccgatgtatttgaaaagtaatgtggcattcgaagcaacgctttgcttgaaatagccgtcaatgtcggtcacggaaccttgagtggttccctctaccataacggcagcacctaccaaaggttcgccggtttcagcgtcgacaagctgaccatgcactgtggtctgagcccatgctgcggaagtaaataccaacaacacggcaaccaacagaaattgaattagatgttttctcataattctgctttttgttaatagatagtgttaattaaagtttaaaatgatattgagttgcaaatatactatttatatatcaaataattattacgtttgcactacattttttcagcctaataaagcattctaaaaactttttaaaaaaaagaaactccacaaatatcttgcagagtttctttttattacagataaagcaggtatactttcagtttaaaacccggactaatcattcattaactttctataacgaacgcgagtaggttcttccttacccaaacgtttcagtttattttcttcgtactccgaataggagccttcaaagaaaaatacattagaatcgccttcaaatgcaagaatatgcgtacagatacggtcgaggaaccaacggtcatgactgatgacaacagcacatccggcaaaatcctcaagaccttcttcgagagcacgcagtgtattgacgtcaatgtcattggtgggttcgtcaagaagcaacacattgccttcttccttgagacagagagccaggtgaagacggttgcgctcaccaccggaaagtacaccgcaaagcttttcctgatctgcgccggaaaaattgaaacgcgacaagtaggcacgggcattgatatcgcgcccacccatgcggatgaggtcgttgccgcctgaaattacctgataaacgctcttattgggatcgatgtccttgtgctgctggtccacataggctacttttacggtctctcctacctcgaactcgccactatcgggcgtatccagccccataataaggcggaaaagagtggttttacccgctccgttaggaccaatgatgcctacaattccgttaggcggcaacatgaagttaaggtcgtcaaacaagagtttgtcgccaaaagcttttgctacatgcttagcttcaataaccttgttgcccagacggggaccgttggggatgaagatttcgagcttctcttctttctctttcacgtcttcgttcagcagtttgtcgtaagagttcagacgggcttttccctttgcctgacgggctttgggagccatacgcacccactccagctcgcgttccagcgtcttgcggcgtttgctggcagtcttttcttcctgctccatgcgcttggtcttttgttcgagccagctggagtagttgcctttccagggaataccttcgccacgatcgagttcgagtatccagcccgccacatggtcgaggaagtaccggtcgtgagttacagcaattaccgtaccttcatactgctgcaagtgctgctccagccagtcgatggactcggcatcaaggtggttggtaggctcatcgaggagcagtatgtcgggcttctggagcaacagacggcaaagtgccacacgacggcgctcaccaccggaaagatgttctacagactggtcttcgggcggacaacgaagcgcatccatcgcacgctccagcttactgtcgagattccaggcatcggtagcgtcgatgatgtcctgcagctccgcctgacgggtaaaaagcttgtccatcttgtcctgatcttcgtagtattcgggcaggccgaacttctggttgatttcctcgtactctgccagcgcatctacaataggctgcacgccttccatcaccacttctttcactgtcttcgcggggtcgaggtaaggctcctgagccaaatatcctaccgaatatccgggcgagaacaccacttcgccctgataggatttgtccaagccggcgataatcttcagcaaggtcgatttacccgaaccgttcaaaccgatgataccgattttcgctccgtagaagaacgagaggtagatgttcttcaacacctgcttattgttctgctgaatggtcttgttcagccctaccatagaaaagataattttcttatcatctactgttgccatgtgagttaagtataaatataaagtataaaatataatgttcgagatgaagtgtgagactcctgcacacgaaatttcggtacaaacttacataaaaaccttggatttttatgccagtccaataaaaaacaagaccacctccctctctttcgccttattcgtactcttggtacacaattttttgttatctttaggtctccagttattaacctataaattggcttattatgagacgagtatgtggtcttgatgttcacaaagatagcatttatatgtgtatcttgtatgaaaacggttcaaaaatcgaatctgtttttggtgtattgactcctgagctggataagttacgtgatttgcttgtttctcatcatgtttgtgaagttgctcttgagagtacaagtatctattggattccaatttggaatattttgtctgttgactttagtctgaaacttgtcaatccttatttcatcaaacagcttcccggtcgtaaaagtgacgtcaaagatgctgagtggatagctacagttctgcagaaaggtttgattcgtggtagttacgttccggattgtatgattcaatgtttgcgccaatatgagcgtcgcaatcatgaactctccaaaaacatcgttcatgcggaacaacgtatggatatgattcttcaacgctgtaatatccgtattagcaactatgtctcctgcatctcctgtaaaggttatcaaaaggttgtcaacgccattatatcgggagagagtaatccgaaagtattggtaactttaattcataaacgtaccttgaacaagcacgggcgacaggttgtcgaagattctctcaatggttttgtatctgatacggaccgtgatatactccgtcagtatcgtgacgaacgtatgcagatggaacaacacaaaagtgaaaataaagccaaaatgcaggctatttgcgaagcgcattattgcgaagaattagaattgcttcaaactcttccgggtataaaggaagagagtgctgccaatatcattgctgaaatcggagtggatatgaagatgttcctaaccgcatccgcaattgtaggttgggcaggccttaaaccgcgtaatgaccagagtgcaggaaaaattaaatcccgaaaaatcacccatgggaataaataccttcgtaaaatattggtggaagcagcctggagtgcggctagaacaaaagacagtaggttcatgaaaatgtatcaacgattattggcacgaggaaaaagcaaacaaaaagcactaattgcagttgtaaggaagttacttgttctgatttggaatatgttatcaaaaaaagaggctttcaatccagaatataaaagaagaatacaagcagcataaacttaaactttattgatgaaaaggaccgtatctttgtggtagagtaaactccgttttgcaaactgtctgagaaatcaataaagaattgaaagccagtctgaactttgagttcgaagaggaaagtaatataaaacaggagactaaacagagtagtctcccataacaacacatgccaaaaagaatgatacctctgccaagccgaaagagagggaggtggtcttatttgtttttttagaggaaagataagaaaaaaagcgaaaatcttttgcaactttcaaaaaagtatctatctttgcactcgcttaacagcaataaggattgattcgctagctcagcaggtagagcacaacacttttaatgttggggtcttgggttcgagccccaagcggatcacttgaaaatcaagcagttatctaaaaagataactgcttttttcttttgtatatactgcgatttgacggctttgatgtaaacggactaacgtaaaaacttcaaaataaaaagcacaccttcgcaaaaagaaacataaaagaggataatccgatatgattaccaaccgggaagaagtgatagacaaggcattcaaggtgtttttgaggatgaactacgagaaagcgagtatcagcacgctggcgaaagcctgcggggtggtaaagacgggggtagtatattattttccccataaactcgacttgtttatggcggtagcagacaagtatgtcatacagatgcagacaccggccaacaagtttgccgggccgacggaaacactggctgaatttatagaacagtatgtggcaggagtgagtgcagtcatgaaccatatcatcaaacaggtacaatgctgtgcagatgataatgaatgctgtcccaacttctattatttccatttcctttcccaagtgaggatgtattatcccggagcccgtgaaaaaatggaagaaatattccgcaaggaacacgaactatggaaggcggtcatacagaaggcaaaagagagcggtgaaataaagcaagatacggatgtgaaaaagaccgcctcgttgttccgtcaaatattcctgggcatgtcctacgagcaatcgttcctgaatggtctggatgtagacgaattgaaggagaaattagattatctatactcgctcctgaaagcctgacttcttttagcaatatttaaaatatttcgataaaaatattttctgaacaaccgttcagatttcaatactttgctttatctttgaggtataaagcaaccgccaaagatatggacaagatacagaagcaacggtcaagcatcgtcctgtacagagaaaaagtgaacggtgaacgctacatacggataaagtatgcaaataatccggcaattgccctactactttcccgggagagcagcatacaaatggcggacaacgcttccgcctacataacagttaccgcctttaaactaccggatttctccgaccgctcttctccctacgcctacatagattatagccggacgtacgtgcagcaccccaattcacaacagacatacatgttaccggaagactatctgaaactactgaatctcacctcacaaggcgttgtcagtgaatggatactggtacgcatcatgggcaaaatttgctgggatacaacaatattaaagatgacgaatatttatcttcatgtaacgaatgccctcaagtcaagcatacccaatccacttgatacgctggatgatttgtagggggtagctattagagattaggaagcacacctgtcaggtgtcagttatcaaaatagaagataccaaacaagtgtttttacaaataatattatcaacaaattaataaattacaattatggactttataaacaaacttttagacgaaaattacgattggggtgataaacgtattgatgaagacgtttacgatgaactgagtgccgaactcatcattgattacttaaagaaacatgattcagaaattcgccaaatgctggctctaagctggaattttgataatcctaagaaagttatccaatggattgtcgagcagcccgatacagacaaaggaacatgcctgctactttattggcggatggctccagatttcagcaaacagtttgtaaaccgtgaggaatgtgaaaatactcatagttggtatcttgaagattatgacatcatccaaacaattgaacagaattacacatcaggattttacaggaaccaacgctacgctttcaatccttgtcatgattcgtatcaagatggatatgactggactgcaagtttgaatccttcggaatttaagattcccattccccaagaaatgtttactgctttaaatggtattgcattggatgtgccttcttgggaagaaggtatccctgaagacttgcaacctgcaatggatcgtttggctgatttagtagatgaataatatgttgataacaagcacctattccacctaacggtggcaagctgcaacccattataaacaatatgtatcgcattgcaaacatagtactatttgttcttgttgttcttgccattttcgtggtaatgggttgctcttgtagtaaaactctgtgtgaacgtaacatacaagatgatatactcaatattgataaattccgtaaacaaagtaaaaaagagtaccgctatatagaagaagatgcgaaaagattgtttgcaaattcggcagcggtttatcccgatacattataccgccaacaatatacttcattgcaaggttatttctatggagaaactggatttgacttatattgtatatggtatgcacagtttaatgccaataataggaaacactatcgttgtgaacgtaagacattaaacaaaatattctattgtgtaaatgatatgttgagatgtattgccgggggcggaactggctttgcacatgaaacataccgcataccagcatacacagagtattacatctataaatatcagaatatggaagccaataaacagtaccaagataatgacataagccaaacgatttcaaatttatggcagataatggctacatataataacgaagatatgccctttgaaatattagcttataaaatgaaatacatatatgaaaatgtggaatatataaaatcattacttactgctgaaatatataattattgcctgcaagaatatatgtgcagactaataaacgaaaatgtaagtgagcaagaacaattaagtttataacaacgaaagatagcatctgacgatgctcctttctaaccattaccgataatgactaaagttatagatatgaaacacctacaaatgataacaatgatgtgtgtgatttgtgtaactgcaagttgtacaacgcaaaagattgcatatagagaacggtttgaagacgcaaaaggatatgccctttatgcttgtatcgcacacatgaacaagtttgttgatagtacatcatttatcaacaaagattattccggcgaatattttgttcaattaagcagtttatcgctggaagaaattatcagaattaaggaatatgtggacaaagaatgtatgaattattggagcatatcacaaaatccggaaggtaatatgattgcatattcatcatggaaattctataactccaaagacttggataactttattcataagacattaaggaaaaatatcggtaactacgaaagatagcatctgacgatgcccctttctaactattactaacaatacgaataactctttatgataaaattcattttagatgcgatgtattatcagatattcatatttaatagggataaatttatattggaaaatccacatgagcggacgatacagataatatgtggaatattatttcttcctgttatagtattggtatatctactgatagaggagaatttcaattataaaaccccttttgtgtttttcatcataatctatgttttattatacaagacattctgttcgtattatatcaaaaggaaaaaaggtatggaaattataaggagtaaacctctgatatttaatagccaaaaggtttcttccttcatatcatggatgatttatcccattttggttgtattactttattttataataatacatcgtcattggctaaaaattatacaataaagatttaataagttagtaacaacaaaagatagcctctgacgatgctactttctaaccattaccgataaaaacgtaaaatgaagatacttttttatatcatattgtcagtgctattcccatttcaaatgataatggggcaaacagggaaagactccattcttttccgtgggaacattgtatatgatggtgatgccagtgaagctactttcctacatgaactatatataaaacataatcctaaacaacgatatcctatcgtttgcgattcggatttttccattaaatgtatgcgtggagatacactgctcatagaacattttgacacaaggtatccttactgttttcaagtagtggaatttattgcgaatgatacgcttccacagaatatccatgtctggagatacccaaagtcttgcaataattggtattatcatcagaaatataaaacgaccaatctatcagttaaagatactatcagaaaatcagaactggtcggtacatataaatgtagatgggaactagaaaacagcgactgtctggttacatctgatgcaaccatgaaattaaatgctgacggcacatttgaattgattgatgaatgggttagctgggatatatctggaactgttttccatacagggaattgggagattaaacaaaatacagtcatttgcaaagttgttcccgaactgattccttcaactatacaagaacgttatcccggtcaagtgctacattttgtctggacaaatctggaagatgatagacaagaaattatgaaagaagaaaaagtctataagtttcttgtatataagaaagggttaattcagacagataaaatagattgtatatataaaaaaataaaatatcggtaactacgaaagataacatctggtgatactcctttctaaccattataaacaatatgcatcgaaacactactgtcccgtaaaagtggataaatagttctttgaaattattgaaatatagtcaattacacggttttttgaaatgaaacggacttgattttgcaactttgcagtctaatacaaatggctgctatgttccaagacaaatacgtattctctcaattaaccgcttttctgaacaggactcagttcaacaactatgttcgcaagtatgatggcaacagatatgtgaaacatttcacttgctggaatcagatgctcgcgatgatgtttggacaactgagtaaccgtgagagcctgcgagacttagtcgttgctttcgaggcgcatagggccaagcaatatcatcttggtttaggtcgtgaaccgatagccaagacaactcttgcgacagcgaaccagaaccgtgattacagaatcttcgaagactttgcattctatatgatgaaggaagcctgcgagaagcggacgaccaacatccttgacatttccggaaagaaatatgcgtttgattcaacaacgattccgttgtgtcttgcaacattcccatgggcaaagttccgaagcaagaaaggaggggtgaaagctcatgtcttatacgacattgaagcacaagttcctgccttctatactgtaactactgcatcaaagcatgattccacagcaatgtcttcaatccattatgaaccaaatgcttattatatattcgacagggcttatgactcctttaaagaactctataggatacatcttacagactctttctttgttgtcagagccaagacgaacttaaagtataagacagtcagatggaagcgaagaatgccaaagaacataatgacagatgcggaagtgaaactgaccggatatctctccgagaaaaaatatcctgagtcattcagactcgtccgatattacgacgaagaggatgaccgtgagttcacttttttgacgaatgcaaaacaactttctgcactggatgtcgccgatctttataagaaaagatggttaatcgagctgttcttcaaatggctcaagcagcatctcaagataaagaaattctggggcacaacagagaacgctgttcgcatacaaatcagtgtggctattatcacgtactgtcttgtggctattgtccaacatgatatgaagttgaaacgttcaacctatgaagttttacaaattctcagcatatcattgactgacaaaacccacttgcgtgacctgttcgacaagactaatttcaatgatgtcaaagatctaaatgatcccctgattccggggctttttgattaattgtttaactcgtcccattttaacgggacactaatggcatcgaaatataacgaaatctaagttcttttataccattcttggtattcatgctttatgtggaatactggggctgacaatcctatgctctgttccggaaatggatcaaatacgatggaatatcggatatattatcgggtatctgttcgtcttgtccttgatattctcattttttatacgcatacctgataaagtacctaaaggagtcaaatacggcatacggatatatagaaatatctatttgctcagtataattatgagtctgttaattcctaaagggttgttcatgttgttggcaatattcattgactgttcaagcaattccgaaaagatagctgaagataagcagtatataatccgtcattatgtaacggcatcactatttgatgactataatgaaaagagagtatataagaaacaaggaataatagagaaatatattggtagttttgatggtggtgatgttactccacacaagagatatgagatatattcttttcaggtagatgaaagtaaaaatgtttttattggacactgtcattcattacttaatgcaaaagacagtatcatgccttttccgattgtaaagtctaataattgattctgtttaactgtctttggacggtaaatacaataaaatcagtaaataggaaagatttgaaattttatataggctatgtttttatctttaagataaaaaagtgctgtttttgagttgaaagtgatagatatatgaaacagataatataccatattaatatttttttcctcttttggatttgtggagtagcctattcacaaaatcccaaagcggatattttgcggcaagatctttcaggcttatttgacaatttaagcatgattggcatattaggagaagactgtagccgaattgacattcattttaccgaagttcggaaaatggataataaagaatatgagataaaaggtgccagtcgtacccgattgactttaatctgtctgtttaaaggaaatatttatatagatagcatttcttcttgttctcaaatgatgaaaagtgaatgtatggaagtggacggtttcatatacgggcattattcgtttgcagaatacggagataaacgatatagcggtgtattttccggttttttcgagcaagggtatcgggttaacggacagcaaatagagaaaggacggaatgaaatggcagaactgagattgaacttggctgaatataggggcaactggagatctgcaaatgggcagataaagatctgctcttgggcagatgaagtcatacccgatactcctgtaaacttctgcctgtttaatgatgctggcgaatggattgtgctaccaaaatatcgtaagaatggctgggagaatctatataatgcctaccacaatgaaaatctgacaacggatgagatacaaaaggcccgtgaagtggaagaacaagaatggtgggcaaatgaaagccaatcatgcaaaacacattgagtttataacgaagcgtgattacgcttgacagcgttcctcgcttaatcattgacaacataataaatcataaatacaatggtaataaaattacttcatacagttttactcttcttgtttccgtctatgacagttataggccaagtattggatacagataccttgtgctataagaataatacggtatatcaagagttaataatcaaaagaatcaataaaaaaagaatttatttcgctctatcttctatcaaaaagggggagcaggtagatgtgtataaaggttatgcttacatatccgattatgcttacatctcttcagaaactgattttacagaggatggttcattgtatccagtcattgaatattggtatgaagacccggatattcctttgtcgataagagtcaactatgatatgggtgtagcaagaatttcatttgcagaaaacctttcattaccttatatttataaactaaaaaagaaataaattcgttgactatcgcttgttccacctaacggcggcaaacggcattagattttcaataaaacggatatgaagaatttgaagaaacttagtatatatttcgctgtcactttttccatagttttagtatgtggctttacaggacttgttatcagggaagccaataaaggcacattttatgaactggctgcaacagaaacattagtatattgtttgccgttgggactaactgcatttgcatccctgctcccttacagcttgagtgttgtaactttcctgagcttttgggcaatgaactgtgaaaaatggatagttttttcccgtatgttagcaatcggactgatttttgtattgcccttgtcggtaatgacctattgttatgattggtttatacctccccaaacgcaggtcgtatctgttggaaaaatagtagaatacaaggaaatggaaaacgtttatcacaatagtcaaagtgtcccttaccaaaacattaaatgcaatgaatcactactgtcccgtaaaagtggataaatagttctttgaaattattgaaatatagtcaattacacggttttttgaaatgaaacggacttgattttgcaactttgcagtctaatacaaatggctgctatgttccaagacaaatacgtattctctcaattaaccgcttttctgaacaggactcagttcaacaactatgttcgcaagtatgatggcaacagatatgtgaaacatttcacttgctggaatcagatgctcgcgatgatgtttggacaactgagtaaccgtgagagcctgcgagacttagtcgttgctttcgaggcgcatagggccaagcaatatcatcttggtttaggtcgtgaaccgatagccaagacaactcttgcgacagcgaaccagaaccgtgattacagaatcttcgaagactttgcattctatatgatgaaggaagcctgcgagaagcggacgaccaacatccttgacatttccggaaagaaatatgcgtttgattcaacaacgattccgttgtgtcttgcaacattcccatgggcaaagttccgaagcaagaaaggaggggtgaaagctcatgtcttatacgacattgaagcacaagttcctgccttctatactgtaactactgcatcaaagcatgattccacagcaatgtcttcaatccattatgaaccaaatgcttattatatattcgacagggcttatgactcctttaaagaactctataggatacatcttacagactctttctttgttgtcagagccaagacgaacttaaagtataagacagtcagatggaagcgaagaatgccaaagaacataatgacagatgcggaagtgaaactgaccggatatctctccgagaaaaaatatcctgagtcattcagactcgtccgatattacgacgaagaggatgaccgtgagttcacttttttgacgaatgcaaaacaactttctgcactggatgtcgccgatctttataagaaaagatggttaatcgagctgttcttcaaatggctcaagcagcatctcaagataaagaaattctggggcacaacagagaacgctgttcgcatacaaatcagtgtggctattatcacgtactgtcttgtggctattgtccaacatgatatgaagttgaaacgttcaacctatgaagttttacaaattctcagcatatcattgactgacaaaacccacttgcgtgacctgttcgacaagactaatttcaatgatgtcaaagatctaaatgatcccctgattccggggctttttgattaattgtttaactcgtcccattttaacgggacactaatggcaatgaataaagaattaaaaaaatatgtaacagatgagttattgctgattgccaataacgtgacaggcgaatataccgacaagcaggtgcagcaggcgaagttggaactatataaccgaggcgtggacgacaagataatagccgacatcatggaggagaaagaggaagccttcatgcgaagactggatgctgccgcacgtgcagaacaggcacgcatggacaagcgtaacgaaaggaacaggaatattagctataaatggcgggaaatgctcttcatgtttatgttcgccccgttttacttgtttaaaaggcattacctgccaagcgacttctttcccaaactgaaacagttgaaagcggaaaagtatgatttaaaattcaggcaacgaattatcagtctgcttgccggagatatggcttggatttttatctattgggtatattattcctttataaagaattaaaggattggatatgatccttaattctattaaaatcgttatgttttctatgctttgatatgcttatttttgctatgcaccaaaaataaaattcccgtaaaatattaatttacaggggttttcttcgttttgcaattctttccagcggagagacggggaatgattaacttttaatttctctattcattatcagtatcttaccaaaagcctctgctcctatgacaccgaataattcaccgcgtatatactgcaactttcttcctattacactcttacttaatgcgagttcgaaataaaattagaaaataaccagttgccagtcattgataaaaatgacatcaatagcgggtttcttttcaaagaaacagtatgcagcaatggctgacagagaattagcaatgaagttgttaaaagaacgatgtctggagtgctctatctgtgctatgtttttcaactcgtcattgactgtttcaatcaaagctcttttcttgagcagaatcttgtcagcaatactcattagtgagtttctaatattgtttttaactttagtgacaagctttatgccatcaaggaaaaggctctcaaatgagacccatccgatatatcctttgtctgcacagagtttccctttgatgttctccagaaacctaccctactttaacggtttccggtcattcacattcccaagagtaaacatgaaatagaggatttcccccccttatcattaattatcaaatgcagttcaaatccaaagagccatcccatagagcattttccacgttctgcaagtccttcaaatgttttatgaatcagaatcctttggttacgacatacatgcaaaggagtggaatcagcaaaactaatgcccgtacacgttcccaatagaagcttcttaatggagatagttagaggaagctgtatttctttctccaactctacgaaacggttataggaaaccagattcagaaacaagtgcctaatatgtttgcatacataccctttgtaataatgcttgaaacagcggcccctaaatgaaacaggataagaatacccataatctcagcatcactcatgcagttgggcttgttgcaatatcttttttcttatccttaatcatatatttttcctgttacaacacaaatttcttgcaaaaatcatcggacagacaatgaatctctgtaactttagactctgagaacatagtggtaatcgtttaaacaatataatttgtcaccataaatttaatacttttattactatatccctatgtctctatagattatatttattcttatttcgaactcacgttatttatttcgtgaatacatgactataaaaagacacccgaatatgatacgctgcagaaaaacacaacaagattttttactccgtgcaagcaaaagctcacacggagtatgacttattccggcaaatactttttgtagtcttcctgcacatccggatcaatgaccggacgtacggaataggtcatgcaacgcctgtaaacagcgcttgtattggaagtaggcgcccaaccggcaggacctccagtggaattaagcagataacgccctgcatgagtatcgcttctggcttgtgccacggcgaaaatgacttcattacccccagacttgccatctgtaaaactgccgtcatagatacttccaggcagcggtgtgttaaggccggaacgacttgcataataatatgcagacctcaaagttacagcctctttctgcgacataatccggaatccgtaaggagaagggtcaaatacggttttcccgcctacatcctccggattccctgtccgagaaggctggttccatggatacaggaatacccagcggtctttgaaataactaacaaacctatgcgggaaacattcatacagccagaaactttgatgagagacgatagcgtttggatgttcgatgctctgtttcatcgtaagagcagcccctctcgcttgctgagcatctgtttttccataatccacatcatttcctctctgttcccaaaggaaatcaaatagcttgccactgccgtcataaaagtttttattgacacgaacatcatgtgccgggaacggatctttcctgccccattgatattgcataccaaattccctatatgcatctgcactatactgtgattggaccctttcgtacgctcccaacagatgcgacatcaatcgaaccgttttcggaccatcacctccctgactcgcaacatccaatactgtcggatacttgtcaacaatccagatatgccaggaccagagtgtcggattccccttgatctttccagatttaatttctatcaacacatttcccggagtctgccctggcttgacataaatatatgatcccggaccggaacctccctgttcggacaattcactgagtcccgctttttctatatcattatgcccaccagcctctttaatatccgtccacacgatattgactctccaatcatcatctgcatccaacttattcaacatgaaatcctctttgctaccgggaagtccctgcttatcacttaaaacagcgtcatgatccagaagctttttgtaatactcataggcagtatttacccgggaaacaggaataaagatcccttgctttgctcccgctttaagcatatatgtattcgcttcaggctgtacaattccggaaaccagctccaactcaaattctctttccggaaaaagaccatcaggggaataaatcttgaatttcgccttaccggagtaaagacgtgaggttgtgatatcgtcaacagccgtgaaagaaactggtttcccggaaagggaaggatccttctcatagaaaggagcgaacgtctctatcacatcacctgctccgttgtcggacaaagcggaaaccaactcaattttgtattcgctgttggctttgacataatattgcttctgtttgccatccatcagatagatactgttattggataccagcaatgactgatgcaggaatttgtcaaaaaaggggatagcactatattccttctgcaggaggctgagtttccccgacgcacttctaccggtttccacatgtgtgacggtgaaagtataagtggtattgaaattatcgaaatactccgtatttcctgtaatgtcgggagctgtcaccgtatacttccatattcccccggcaagttgacccgctttctctatcttgaacggattggcggcttcagcatggaatacgggttccaaatcatgcggttctgtctttacatagaaagtaaccctggcacctgcctcttccgccgtaagcgtccgcccgtctttcgttaccactttgcctgcccatagctctcgccatactgattgacctcaataaactccagcggccggctgcaggcctcgtccgcaaaaatctgtaaggtgacattgatatccttagactgctcaaagccaagaaaccatttcatacgccccgccttcacataagcggctttcaacgcattctgggcatcttccggcttttccggccaccttcgggatgcatccacatgctctgtgaccgtaaaggtcgcggttttctcatccgtcggtgcggtcttatccggatccgaaggttttatagaattactgatccatgcaggcagtccctctatcgtaaatccttccggccaggaagtctgcactttcgccgtcaggctgcctccctccctataaaaagtgaaatggtcggcactgacccccagcatatattgcccgtcatacaatacatcagacatagtggactcgttccataccacaacattatacatgatgttagcggccggtcctttcctagcatcctcttccgtatcgaatcccggaccacctacagccttgatatttaccagataacggtggttacgcagcaagggaaggtactcgtatgtcgcatcagcctcggctccggtacgtttcaggtagtctatccggaagaaagtttccttgtcaggacggctcttatctgcaccggtcagtccgacaacgatataaggacgtttcaagtaattttccgtattattctcaggaagagtttctccgttggctccttgcgtggcagccgtcggcacattgaccgcctccggaacatatacctcacgtaacaagattttctcatccactatggaaggtgttctatcaatctttcctgtcacagccggagcaggatcaggaatagaaggctgtttcgcctttctattggcctcatcccagtaaatcccgttctcgaacggagagacccgtcccgtcgtattggtattataaaaaaacactttagtcagcgttatcccttcaatccccccggctttctcatcgaatgtagaagccccttccgatatgttgctcaagttaagccccacgtccacacgtgccacggcacggaccagatagacagttccaagtttgggaacggcaccggcactgtgatccaccctgaccgggtccgaggcaccccacatcggcaactccccgtctttccatatccccttgtccggcatggagaaagtgaaaagttgcatgacttcctcccgtgtctttccagccagtccgtctgcgtctgtattagctgaccgggtgacattggccagcatcacgaatgtactggtatcgtctgaaggagtatttttcgccaacaaggtcatggtacccttgtctttcttgtcagccggatcaccggaaggaatataggaggtcactttggcctcatatgaaaacttgttgtccttgtcaaacacaagtaccctaatcctctccgctgccgtggaattctccccctccggtgtaagagaccgtgtcaggggatttcgaagaccaagtccttcgacagacatgctgacagacgtccagccgtccctgacaggcatttctgtcccgccgtttccatactcatcgaagggatcactgcacccttgcacgagagggattcccatagatatcgccagaaaagcgactatcaaagtgtaatgtttgattctcatatgtatctattctttaaactgtttttcttcgtgatggcatgactgaccataccttagttaccaggggatagccacctccgtatcctcccattcgtccacaactatgtcatattccatatttccgggtcctttcagtgtggcgaagacacggtaaaccgtattacgccggatgttgtaataacccttatcattctcggaaagatccggattatagagttcgatcctatacggcttatcgggggttcccatccgataatcgacggataagaccaaggccagcgccccctctttccctttcccgtagactcccggagccacatagatgtagctaggtgtcttacccatatatggaagcagtctttctttgcatttggtcacaaaagcggattctccggacccctcgttggcaccgtcatggaaactagctctttccggcaataataggagagtccccgcataatctactcctctcatatccggattaccacttccagtggcggtgtattccccagaagaaggcagtacagaataaccgctagcttcattgttcagggtgagttttgtcactttggaaagaggtaacaaaggagacagataattccccctgtcatcaactgttgtaagtatgaactcaatacgggcatgcatacgttccagaagtatgcagggagaaagggtaatcctattattactaactacattatccggaacatggaagttacactgcccagtcatgggaagatacttccggttttctcctttcagatcgtcagatgtgaaaatttcggtcttttccattaattgcttcggatcaggaattgtatgtccattcctgattttttccaatccggattcacaattaaccaacaaaacaaaattataatcgcctcccatcaactccaggtccaaggctatattggattcgcctgcattcactctacccatctctctcatctcaaaatgctcaatgccggttatacccgccaacgggttggttgttccttgggaataatagaaaataactttttccggagagctctccatattcttaaaagcgaagagaagaacatgtttaacagttttctcatattcctctgcaccgatataattctctttccactctccggatgaacgtacagacgcctttgtcatctgagaaataccggttcctccattcatttccgccacaatccggatgggaatacccgaaactgatttttctaactcttccgtatcagacgaacatccggtcaattgtacaattgatacacaggccaccatcaacagctttatcacaattccgtatttcattatctatcatttttataataataccaattcctttctaatattacacgaatcattagttttaaaatctgtctgattatcagttctccaattctatggggcgggaaacgacattccaatccaaaacggtcgcttgtatcagcatccatgtttccttttcgtacttgagtttcagggttatgggaaaatcatggtcacattccaggctatacggcggttcgcccgcatctccccggaacatgaggatgtcatcaaccagattagcggtataaagaatctccccggttgtcttgtcaatcagagatacgaacgcatttcttccctcttccagtttcatcagcgtgaaatccgctttcaatgccccttcagcgtcatgtacggcttcggtcgcgtattcaaaacgttcacaaagggcgatccggccgttgaaatcatacacaccgttgtcatcttctatcctgatgacgaattcctcgtctatggggaaaggggaacctatggaactgattgtgaagtgtacccggtatgtcaattcctgcatattgaaagccacccgttcatacacgcttcccatatccttccggttctccagtgatatggaggcgagaccgacatacagaggcccgagggctgaggaaatccgtccgtttttcaaccgcagtgacacttgcatttcctgtctggtagtaacgccttcccgaaaatctgaaaaatcataggcctccaggtcactgccaccccatgcgacaaacgtgagtttccccgtatgccgcaatgtggcggacaaagaataatctgccgaaaggactgccttcttgtcagaaaattcgcccaccagcagatcatcatcatcaaagacaaatacccggacttctctgatatctgacggatatccaggaaattgttcgcaaggggtctgtctatagaactggaaataaacaccttgcggacaaccacccaagtcatcaaataccgtagaattacatcctataagacagtaaaccagcaacatgataaatgcgatgtaatgtacacttctgattctcatttgatatagtttatgttggggttatttaacagtttgaaaccaaactgtttgttgattggagaaagaagaggaaaaattcctcttctctctcacagctatgtaagaaattgcaggctgaatttatcagcaatctaatattaaaattactccaaaacgacatcacgtgaaacgaggttccactggagtaccttggcctcgacacgcatataggtctcttctttctcgatatccggattttcaggattcgtcggttcttccttatcatcaggcttcggcagatacggatctttaggatcggaaggatcccacggcatacctaggccctggaaagccgtaattgtcaacagataggtgttgttacgacgagtattagcgttcacaatcgtttttccatcagcgtttgtttgacggttccataacgcacgatatgcgcatctcccttttgcgtaagtgtaagctttttgatccgggctcaactggcttttctttgcggcatccttgctggcatagatcagcccatcaccttctccttgatagaacgtctcgccctttaccccgggtttactgattaacttcttttgatcttgatcccaatgcaatacctcttttggagtataagtcgtatagaccttggcatacggtaggcgatagtaaccgaaattcttattgtcagttgtgagttcctccttttttacggaattctccaagaaataaatacctgccacctttttagcctcagtagcatctgccgcaaccgccttggccgcgtacatgccaagcttatccgctgttggagtctcttccggcaagaggtttcccagacggatcaaatgctccttggcagtaccgttcggatcttgggcattttgaaaatcaacatagtcatcaatagcggatgtgaaatctttgtaaagcccgtctcccactgtgattgtacgatctcctgcatggttgcggaaaagatatgtctttgcggcgccgttgatagccgtatacgtgaggttatcaagatcaaccgttcctcttccatcagcagttttgtctttcaaagcggcatccttcgcgaccaatccttgtgccacgacacgctccacatcaaaggagaatacattttgagcctctcccatgcctgtcttgactgtttcctcggagatattatccttgatggttttctgctcggcctttgaggtcatcacgaactgattttccatggcgagagccgcgatgtcggccaccgcagtagccgtacttccatatacacagttcatggccgttgcaatactgggatcaagagtgcccctgttaaacaacaacgccattgcttgggaacccgaagtggctttccatggagcaactttgtaagtgccggccggtgtcgtctcccagaatttattctcctcgtcagcgcttcctagcgtccagtcctgaggcgtaccgggagaaataagccgtagagattcaagtgtactctctcccggtcttcctccgtaatcttcctgtttgtcattcaccgctctggttgagacatccttcatagcggaaatatacattcctgcaaatgttgttccttcgcccggattgtttacctgagggatatcctcattattacaagctgtcatgcccagacttaaggctgcaactcccgctaaaaataaattgtttactttcataacttaaactgtttagtaaataaataatttaattattaatacattaaatgcttgctatttatccgttaatcctgtcatggaaagtccaggagttttcattcccggggctccatgtcttttttcagtaattcctccgccttccgccagtctcctttcatactatgggcaattgccataggataaacagaacggctgtcactctttactgtgtccaatatcatcagagccttatccgcatccttttcatactttaaaagcgcattggcatagttaagtgccgccagcggatcaagtgcaaactgttcataagccttcttatatatgtttaccggattttttccctgttcgacatactgttgcgccagcctgtacatctcatactggctcaggcatccgggaacggtaataaacatttcctccaattcgtcatccgtatagggacgaacatcaaattccatgtgaaaaacggtacggcgcaaagtgggataaactgtggaaagcaactccgcataaacctttcccccatctaaagagcgtatagccgcttcacgggccacatccgtatgatgccttttaatagcggataaaatttcatccttatatggcaaagaagatacatttataatattttccaagcctttccagtcttcacccaccccttctatttcgtatatggaggctttcttgagctgcggatacttactcagtacataataagaaagcgtatgagtacgacgttccgccaaatgtttattataactaaactcaccttccggagaagcgtatcccatgatatgtacctcacgaagcctagcccctttgatccgaagccctttggatacaaaatcatccagacgggctaattcttcctgatttttaccaaatccaagaagaagtccatgctgtgcggatttgaaagtgaccttacagtcaaattcttcttcataacattttatctccaccttttccggagtataaaaaatgtatttatagtcttccgggccaaaaaggtctatcccggttaccggtatattcaactggctcacacctttaccgcactcggcacatccatacacctcttcacgaagaaagagatggccggaagccatccaacgttcaaaaggcaatgcttccctgacggagattccaggctccctcaaatctctggaactgcgaatatccttcacaggaagtaatgtacccgggttaccacccagtttttccttacgggcaacaaccttgtatcttttctttccggaaatacacaaaggcgagaaagtagtcctgatattgccgtcagaagataccagagagggatagatataaacaatttcctgtgtcttcaaccgattgatggattctactatattgaaagaaacggtaaacattttcccttccgggctacgtccggttttcacatctgtatattccaaacgaggattcccctttctgacaaccttatcctccacctgtcctaccaccggcaaacagtatacatatcccagcacagaaagtattcctatataatattgtattggtttcattgattctgtttttaatatttatatatgcaaagcatcatttatttaattatatagataatcgaaacggcaagctttgtaggtcccagataatcagctttccccttaccatcctttttcccacaagaagtacatctgaacctgtcatatttaacacgcgcatagcccagtcctaaggatgcctctacactgaatctgctggacagtatccaatggtaacccgtactgatacccccaccataaaaatacccctcataacggtaatctttcatttctttggagtggttttgaataataaaaggaatatttatgcctcccacattcatctgccctccgtgggcatgaaggccaagaaaccagccattgaatgtttcacagatccaatatcttatctccggctgtacaagccagtgactccatttctttgttttgtaaccgtttgccgtggcatcattttcataaaaaaagaaattcataccgatttgggtatccaaggtccatttcttccccagggaaaactctacagaaagattgggtgtcagcagggcatcatagacaaggttgttttttagcacaaccttctgtgagaaagactgcaagctgaacagcagaaagaaaaaaaagcatatttttttcatattgtcgctgattgtttttaaacgaaaaatgcttgttttatgatgttaattatgataatgcaaaattaaaaatgagcaatcgtattttcattatatacattggacatagaattatgtaaaacagtctttttgtttatacaaggtagccagacagatattctttttaatattatcataaattcgaaaagaagttatcattccgccttgtgaagaaaagaatttgaaagccatctattccaatgtgatgttcaccgactacatttctccttgtccggagttcaaccatctatcaaatccctatgctggtttactcaccagtgtacggctctagtctcggtctcacaggtttcctctatggcccgcatcagggagctgatctcgctgtcggagagatggatgtttcctaaaagggcggcagcaaatggatgttcctatgtaacggatttagctaaatataaaggacagataaaagacaaagtattatatgccgaaagccttgtatgaatgcaaaatgaaacatttacagacattaatggtttctgtcctatattgttcaggcaaaaggagctgctgatgtccatagacggtgttggacgtgtagcagcagccaacatgataattactacggaggcctttacacattttgatgctccaagaaagttcaactggtatggcggagtagacccttcctcttattcttccggaagttcccagtactcgaaagcaagaatatcggctgataattgatgactaacaatgcgaagttctccggtgtcagcaaatgatccgtcttgggatctctgataagtttgacactactcattactttattatgtttttacagttaaacaaattgagataacggcatgcataaatctccatcttggcttactgattgcaaatgtagtaagcttatgcccgatattcctgctctaaaaaaacataacctattcaaatacaacacttttcgtagtcccacataacagactcatcagctttagtaccagttcctttctgatgataccaatgccatcattttccaacacagatacatatatttatacgacttcgtgtataatccggctctttttgtatatctgctcttttctttgtatcttgctgccctttttccatatccactcattggatgtcaggcttttatccgagtttatagaaaaaatggtcattttagaaaaatatatagaaatagtttgtgcttatggagcatgccaaagaaacattgtctaccctggtgcgggaaatgcaaacagtcaccacatacaataaaggagtttatatcctaaacattgagttttttttagacaagtacagtaatgagatgttccgtgccggtgctttcttttatatattggtggaaaccggaacagcagaatttgtagttgactgtcattcctatattgtaggaaagggggacatgcttcttgtcgctccaagaatgtctgtaaagttaatgaaaaaaagttccgacttcggtacatgtggtctatgcatggagcctttcttttttgactccctttccataggaagctatgtatacaaacggctttataacagcagccatacgacatatgttttacggctagaggacagcgatactgtacatatacgcaaaacgctagacctgatgtcccactacctcacctccgaccatcctgcagaaatggctggttcactggtcaatttcctattgctgcaaataacggaaatcttccacagtcaaaatgtacatccagccggaagggtcaagcattccgatgctttgttccgacttttcagaaagttgttggctgagaattacaggaaagagcatgaacttcagttttatgctgattcccttcacatatcccagacatacctgtcaagagtgatacgtcagatttctggaaaaacagtgaataattatatagccgaagcactttatacagatgctagacgcctgctggtctttacggatctgactgtaaaggagattgctgaacaattaggcttttcagaccagtcatccttcggaaaattcttcaaaaagaaatcagagacatctcctgcaaactttcgtgacgaatataaaaaactccacaacttgtaaaagtggatgctgtacaatacacgcacaagttggggagtgaaactggaaaacttttccacgcgaaagaacccctctggaatattctatggatacggagcggaacatgttgacaaggagggataacctcataattaccgataatttttcttttagggatacaatcagactttccaacctgcgtttcgataggttatgtatttctcaaatctattaaagcagacaatatctactatatttgagacatattttgaaaatacctgacttcatccgtatttgcctttcattattttactattttcacaccgctttaatgtgaatatgttaaagtcagtttccttttatttacatacggcaaactgtatagaagtataaataatattcttccgggccttatgtattgaactggtgtggattgaaaagcccgttgtcatactgattggtatggatggaagtccgttccaaagagctgggatatccggctggatatatatcaatttgattgtaagtcaaaagcatgtacatcagaattaaaaatattttaattgtaatgaaacatatattttatcatctggccgctgttatggtcgtcgtggtatggggaatgacttttatttccaccaaggttctaatagttcatggtctgtctcctcaggagattttcctattccgttttttgctggcttatgctgcagtgtgtcctatctccttccatcgtttttttgcccgtaatctgaaagatgagctatatctggtgggtggcggagtattgggtggttccctgttcttctttttacagaacatggctctggggctgacacaggcttcaaatgtttctttcatcatatgtacgaccccgttgttgactgctgctctgaccgtattgtccgttcggatggaaaaggtctcaagaggcttcatacacggatctattgttgctctgttgggtgtaggcttgctgatattcaacggaagtttcattcttcggatatcacctttgggagatttactgactcttttggcttctctgtcatgggcgttttacagtcttgtcattcggagtctcacccggaaatattctccggctttcattaccagaaaaatatttttctatggtataataacaattctgcccactttcttttttctgccctcattgataaaccctgctgtattgctagacagtgaagtatggagcaatctcctttttttaggtgtcatagcttcgtctgcctgttatctgttgtggaatattgtcgtaaagcaactggggacgatacaggcatccaactatctttatctgaatcctcttgccacaacggtcggggcgactatattcctacatgaggaagtgaccccagttgcgatagtcggaatcgttttggttctctcgggcgtatatctggctagcaaaaactctcgtcctaactgtactgctataaaaaagcaagcggactaaattctgtttattttattattactataatcatatgcagactacacatggtgataaatttacgattcaaacaatgtattgtttgtgtcgcaattaaccaaacaaggttctatttggaacatggagtaataatcacgatttccgaactttgcatatgacaattaatagagataacaaagattatttcagaaagatattaagattcttaatttctaaaagctgatgaataaaatgctgataagatctggttcttccggtttgagagagtctggtatagaagtttgttatcacaatattcatagcttttgctgcaatgaaaacaataaccaataaccaataaccaatattgatatgagaagtataacaacatttgatttacagtatgcacacagattttatggttttcgaggagaagcccagtatcttcatggacataccggtgttctgactattgaagtggaggatactataaatacgggagtaaatatggtatatccttgtaatgaaatccaaaaaatcgcatggaatgtgctaaaaaactttgaccatgctttagtcctcagggaggatgatccgcttttacccgcagttcttggggtatatgaaaaacaaggtatcaagaatggaaatcctcaaaacacaatgaagggtgaggctttcaagactgagctggccacggcatacccggatgcgcgtcttgtagtaacaaaagagaccatgactgtggagggcatgataaagatcgtatacgctcttcttaaagacaaactgaatatagcaaaaatcacattcacaagtggagtaaatgctggttctgctgaatttgttacaaaaaataagattcaacgctgtcctctttgtggtgttacgcagaatgaggaaagtgcatgtcctaagtgcggatacaaaaaataatcataaccggtaacacagtccaatgatgttggactgtgttgcttgtttttcttgccatatccatgaacataaaataaagacatggtgagattataaaatagaatagggtgttatatagtaatagataatggatatcagaggattctataattttcaatattttgttatattcaaatcgcagatttttataattctcttataatctatatattatgcagctaaattttatttttcatgaaaaaaagaatcatttcgttttcatggcaacatttattgctcatcgtttcattgtccataatgacatgtggagtagccctctgcatacggccaaactttggcagtagtgtgattgccactatcccatttattatagcactcgcagaagaagctagcatagtttccctatttacaattgtagaatatactcacataatgaactttcttttcatcgggcttcagattctcatcctccaccagaggttcccacggatacaacttttccaattcattattggttttgtattcggtttcctattagatgttaatatgtgacctacatcaatcatagtatgtaataaaagttataccttttggaatcagcaatttataatgatatcattttttcaatgtcaaagatttaaatgattcaagtgaactgaacttattttatttttaactatgttccttttttagtgggcagtaatgaattatgataagaatgatactgcaaaatcacatcatacctgtaaatgagaacggcggtttaccgttatccaagcgttattgggctattttagccactgctctaggagttggaatatctgtgatagacgttacaatcgccaatgtggctttaccgacaatcgcccacgacctaggaacttcaccatccgtaacgatttggatagtaaatgcttatcagatggctattaccatttcactcctctctttctcttcattgggagacatttacggttaccggaaaatttacttatctggcgttttgctattcagcatcacctcagggatctgtgcttgtgccgactcgttctggacgctgactaccgcccgtattttacaaggattcggcgctgccgcaatcactggtgtgaatacggcgctactccggatcatctatcccaaacgttttcttggtcgcggaatgggcatcaacgcccttgtcattgccgtgtcgaccgctgccggaccgacaatcgcttcaattattctctcattgggttcatggcattggctttttgccatcaacatcccagtgggaattgctacactcataatcggactgatataccttcctgacaatccggtaaaagtaaccggacgccatttcgacaagttcagttgtctgatgaatgcagtcacctttggtctacttatattcttattagagggtattacccacaaagaaaacacaacattgatcatagtcggggtatttgcgttgttaataattggttatttctttgtacgtcgccaattacgccaacaatttcctttattaccagtcgacctgatgcgtatccctattttctccatgtctatcggcacatccatctgttccttcaccgggcaaatgctagccatgctctccctcccctttttcctccaggagactttgaaacgtagcgatgtgacaaccggattactccttactccctggccaatagcgacaatgattattgctccgcttgccggacggctagtagaacgtatccatgccggaatactgggaagcatcggcatgacaatatttgctataggactttttctgctcgcagtactcccttccaaccctactaatatggatattatatggcggctgttcatttgtggatccggtttcggcttattccaaacacccaacaacagtaccatcatctcctccgctccatccaaccgtagtggaggagcaagcggtatgctgggtactgcccgtctactgggacaaacactgggagctacacaagttgccatgatattctatttagttccaatcaacagttcgcaaacatgtctgtattcagcaacaggttttgctattgttgcagcaatagtcagctgtctgagaatttcgcaaccacgtccattataaatatgcaattaaattgaatacttataatatacaactttatactttataagtaaggaaacgagcgatagaaaacaaccgctactgtcattactgacatttcttatattgtagccataaatagagacatttagcaagcattgtaaatcatctaaataattcatacacaaagtattgcaatttagttgctttttgtatctttagacatttgtccactgtttgtctgcctatctcatgggttcaaagatatggcttctttttgaactatgcaaatatttgatttacaatctttaggctttagtgtaaggataattaacttatataacgtatcaatcattgatattgacactcttcacatattcccgatgagcaacaccccattgaatcattgctgcaattaattctttcaaccgaaacccagaagatgtcaattcatattctaccgtcactggcactgtattataaacagctctctttacaaccccgttcaattcgagttcttttaattcctttgacaacatacggggagtaatatgaggtattttcttttgaagttcattaaacctatattttctaaaaagcaaagcccggataatattaagcttccatttaccggataaaatagtcagcgtatcatttagagcaacaatatttgaataagggcatccattaaagtcttccatataaccagtttatttaaatagtccacaactatactcttgtatattactatactaaagtatattgatatactttagtaagcaaagatacactacttttgcatcaaatcaaaacattcattcgatattgaaaggatgtttctaatattagcaataaaaaaacaatcgtatgaaagtaacattaattgcatcagtgtcagcaaatggaaaagtattgctggcaaacaatcccaatcatcagatagcaccggaagtcatggaatttcttgtacagaaagccgttgagtccggcaacattatttttgggtattctacttataccatgtttatcgatgcgttgcaagatgcccttgcaggaaaagaaatcgtcgtgctatccaacaatcacgaagcccgaagcggtcacaaaaccgttcatactcctgaagaagcggtagaatacctaagaggaaaaggaatggaagaaataatcgttggtggcggagtacagacttacaatgctttccttgacaaggatttggtaacagacatttatttcaatgtcactccaatggttattggtgacggtggtactattggctcaaaagatgatttattcgtcaagtttgataaaatgaattatgaacccatcattgaaaatgtaatcagacttcatttgagtaaataacaggagcagatatgaaaaaaataattttatcagttttattattgggcattataatgggattacaggctcaagaattgaaagttataaatttgaataagccggataaaagcagaaatgttacattgatgcaggcattgaataaaagacattcggaacgagcatttgccaataaacaactgacgcatcaggatttatccgacctgctttgggcagccaacggaataaaccgtccgtcagaaggcaaacgtaccgcaccatcggcaaataatgtacaggaagttgacgtatatgtatgtatgaaagatgggtgttatttatacgatgccaaagcacatcagttgcaacctgttgctaaaggtgattatcgttctgccgtagccagacaacagaattttgtaacagaagcccctgtatgtctgatactggttgctgacttgtcccgctttaatagcggaaatcctgaacagttgctaattgtaggagcttgtgatactgggattatttctcaaaatatttcactattctgttcctcggctggcttagttacagtaccacggatgaaaatggataaaaatgcattggaaaaaatattaaagctaaaaaagtcccaacatttattactaaatcatcctgtcggatatgcgaaataaagagggtataaaaaagcagataaaaaaattcaaaacatctttttgctaattgaataattgcttttaatatctagtaaggataagaataaatcgaggatgccaaatatttttacgttggtccttttttaggctcagtagatttttagtggggattattttttatactcatgaagcattacttacttcgcattatgaaaaacgattatttgaacatgctggccagccttgtgttgccggcgcagatattagattactttcttatctcaagagttgaacaaacctctcaagagattcatatcagtctggatgaaaagatgaatccagagttaagcgacgacgtacattttgaatccaaaggttttatggaagctgtaaatgtgacggactttcccatacgagatcataaggtaattctcaggatcagacgccggcgttggacagacttaagcacaggcaaaatctttagtattcccatcgacctcaacgttgtgccaaggggacccgatactccaaagaatttggagcttttttaaaagaaacgtatggagaccatccccggtaacctgccgtacgcttgaggaattctatcatatagactgtcatacatttgagaaacagtataaggaggtcctcagtggatatcgcaagtgggagcagctatctcatgccgatgaatggatgctgtttccggagaatatgggactgcatttggcaattgacgggacctcactctccaacggtaaactttacacctttgtgaccaaccacgatgcctgtacgagagagtgttccctagtagctgccgtggcagggactaaatcagaggatgtaatagctgtgctgcaacgaattgacgaggaaagtcgctatgccgttaaagaggtaacacttgttctttcagactccatgcgcaagattgtacggactgcatttcctaaagccggtcgtgttatagaccgttttcacattcaaaaattagcttgtgatgccgtgcaggaattacgcatcaaacaccgttgggatgccatacagcaagccaacgaggaaatggaggaagcaaaacagaacaacaaagattatgtcccataccgatattccaatggtgatactcgtagggaattgcttatacgttctcggtatttgcttttcaagtcagccgataaatggacagaaagacagaaacaaagagcagccatcctatttgaagaatatcctgatatcaagaaagcatatggtttgtgccattccctgcggatgatattctcaaagaataccataaaggatgctgcatatctggctatggcacgatggtataacaaagtagaagatgcagggatgcgttcattgaacgtcattgctgctactttttatgaacactatgatgaaatactcaatttctacaaccaccgttcttcaaatgcgaaggcagaatctttcaatgccaaaatcaaattgttcagagcaaaccttagcggtgtagctgacaagaagttctttctattccacattgctaatgctatatgcgtatccccactaaaaagctactgaaccctttttttttatgcttattttgctatgtgccaaaaaaagaaaacctgtaaagtattaatttacagggattttctttgttttgcaattctttccagcggagagacggggattcgaaccccggatacccttttggggtatacacgctttccaggcgtgcctcttcaaccactcgagcacctctccttttcggggcgcaaaagtaaaggaagttttcgaaaccaccaaatatttggtataaataatctatcgaatacatattaaattaagccaaatccacgtagttttcctaaaaaacttcaataaccaaactcaattatcacctttacagtatcacttttgtacaatagacgcgataggtgcaacaatctttttcaagcattttgtcttcttgctgatttatttttatatgcttgaatgctccccttttcaaagactatctatgaattctatcacttccgtattgcttacaaaaatgagacgttttttatatctccttgaacaaaacaaaacgacaatccgtttatataacagtaaaacgacaaatccctcattttaattccatatttactcgtcccgtcccgaaacaatccgagttaaataaacccgtccggtgtgaaaataaaatgtgaaccagaaactatattaaaataaaacaatattattatgagtaaaatcgaaattagaaacctatatctaatctttggaaaagaaaagcataaagcagagaaaatgctgaaagaaggcaaaactaaagaggaaatattaaaggtaaccggatgtaccgttgccgtaaaagatgccaatctatccatcaacgaaggcgaaatattcgtaataatgggactctccggcagtggaaagtcgaccttgctgcgctgcatcaaccgactgatacgtcccacttcaggagaaataataatcaacgatactgatatttcgaaggcttcaaagcaacaactgctgcaaatacgcagaaaggaacttgccatggtatttcagcacttcggcttactaccccaccgctccgttttgcacaacattgctttcggattggaactgcaaggagtagaaaaagaagaacgtgaaaagaaagctatggagtgcatgcaacaagttggactgaaaggatatgaaaaccaaatggtagggcagctctccggtggcatgcagcaacgtgttggcttggcacgcgcccttgccaacaacccggaagtgttgcttatggacgaagctttttccgcccttgatccactgatacgtgtacagatgcaagatgaattactgaccctacagtcgaaaatgaaaaagacaattgtttttattactcacgacctgaacgaagccatcaagctgggcgaccgcatcgccatcatgaaagacggtgaaattgtacagacaggtacttccgaagaaatattgaccgaacctgccaatgcctacgtagaacgtttcgtagaaaatgtagaccgctccaaaataatcaccgccagttccattatggcagacaaaccgcttgtggcgagactgaagaaagaaggtcccgaggtattgatccgcaaaatgcgagaacgtaacctcactgtcctgccggtggtagatgccggcaatatactggttggagaggtcagactaaatgacctgctaaagctgcgaaaagagcaaatccgttcgatagacaccgttgtacgtcacgaagtacactctgtactgagcgataccatactcgaggacatcctgccgcttatgacccgcactaattctcctatctgggtagtaaacgagaaccgggaatttcagggagtagttccattgtcgtcactcatcatcgaagtgaccggaaaaaacaaggaagaaattaatgaaatcattcaaaacgcaatagaattatgataaacataggacaatatatagaaacagccatcaactggctcactaaccatttcgctacattcttcgacactctgagcataggtatcggcggttttatagacagtttccaacacgtactgtacggcatccccttttacattaccatcatcgctttgacagttcttgcctggataaagtcgggcaaaggaacagccgtatttaccattttgggactattgcttatttacggaatgggcttttgggaagaaaccatgcagacattagccctcgtattgtcatccacttgtctttcactgctgctgggcgtgccattaggcatctggactgccaacagcaatcggtgtaataaaatcatgcgtcccatactggacttcatgcaaaccatgcccgcttttgtatacctgattccggcggtactattctttggtttgggtaccgtaccgggcgcatttgcaaccgttatcttcgccatgccgcctgtagtgcgactaactgggctcggcatccgccaagttccgaaaaacgtggtagaagcttcccgctctttcggtgccactccctggcagttactctacaaggtacaactacccctggcgctgcccactataatgacaggaataaaccagactatcatgatgtctctgtccatggtggtgattgccgctatgatttccgccggcggcttgggagaaattgtattgaaaggaattacccaaatgaaaataggacttggatttgaaggcgggatagccgtcgttatattagctattgtgttggaccgtatcacccaaggtatggcacaaggcaaaaagaaaaaattatagaactgaaaagaaataaacgatatgaacagactgaaaataatagccgtactgttgttggcagccttgctgccgacagcttgcggtaacctcaatgacaataagaaaatcagcatagcctatgccaactggtcagaaggcatcgcaatgtcttatctgataaaagtgatattggaagaacatggctacgatgtacggatgctgaatgctgatttagctcctatcttcgcatctttatcgcgcaaaaaagcggatgtattcatggatgtatggctaccggtaaccatgcatgattatatggagcaatacggagacaaattggaagtcatcggcaatgtatacgataatgcacgcatcggtctggtagtaccagaatatgtcaccattcaatccattgaagaattaaacggacataaagataagttctccagtcaaatcatcggtattgatgcaggagccggaatcatgaaaacaaccgaaaaagcattaaacgaatatggtttggactataaactgatgaccgcaagcgcccctgccatgaccacatcattagataaagcaatccgaaaaaaagaatggatagtagtgaccggctggactccacactggatgttcggacgctataagctgaaaatactcgatgaccccaaacagatatatggaaaagctgaatccatccatactgtagtctggaaagattttagtgaaaaatatccgtttgttgccgaacttttacgaaatatccgactggatgaccagcaaatcagctcgctgatggccactatagaaaaaacacaaaaaacggaaacctatgccgtccgccaatggatgaaaggacatcagaccttagtagacagctggatacctataaaaacaggcttttccacaaactcttatatcaacagataacggccaataatgaaaataaaaagcgtatttctttgatgtcaccacatggttacttatatttgtcaccaaatagtgacaaatataaattatggaattaaaagaaacggaaaagcgattgcttgaagcagtcagcaaaataattgaagaagaaggttttacccaaataggtattaaccgtattgcaaagaaagcgcaatgtgacaaagttttgatataccgttattttggtggtttagacgggctgttggcagcctgggcgaagcagtatgatttttattcatttgcctatttcgagtttgctggtcagatagcacaggttacaaccgctaatcttaaggatataataaaaacaatactattaaagcaattggaatatctgaaagatagtcatcttatgcaagaattgtatgtatgggaattatcaggaaaatcatcatttcggacaatacaggcagagcgggagaagaacggtcataagttacagttggagttggaaaagagattaggaaagacttgccataattgcaatttttatattactgttatcatagccgcgattaactatatcatattatttacccggcaatataatatgttcaatggaatagattttagccagccggaagcatgggaggaactgaaaaatattatctctgattacattgatacattcttaatatcaaaaatcaaatgaaaacagtcatattctattcatccacctataacggaaatacattaaaaattgccgaaagcatagcagcaactctttctgccgacttgatagcaatagaaaccaaaatatccgattttgatttatcacagtacgatttaataggaatcggttcagcaatacattttggtcaacatgccatccgattgcaacggttcgtttcagcattgcctttacaaggaaaaaacatattcatattttccacccgctgtcgtccgtttttgggcaattaccacagaacactgaaaaatatcataaaacagaagaaagccaatcttgttgatgagttctcctgtgtgggctttgaccgaacaggtccttgggtcttgataaacggctataataaaaacagacctaacacgaatgatttattcaaagcccggctgtttgctgaaaaactgcaatgcaaactacatcctctttcgtccgtcatcacctcctcaaccgtaacagaaagcaaacaaggcattgtctttttatgggaaaaacaaaacaagatagcaaacaacaaagtagtatttcttaatatcagctcctgcatacaatgcagcaaatgcatcaatgtctgccccatgaatgtttttcaaaagaaagatgccatactgcccatacatggagaaaactgcattcaatgccaattatgtgccaaaaactgccccacaaattctttatatatcaaagaatcatttacaaacggattgcgtatcgccttacgagaaatattcagtactggattacaggatagctataagtctgaaaaataaaagaattgatacattaatttcaatattaaaaacccgccatcgactttctatcaagcagatggcgggaagctatttgccggcactcccgccggctactttaagagagaattaatgtatttacttcttaagaactgatactgatttgaatcaatctttaatttttcggctataagtaccgtccagaccgcatattgcaatctcatgcggcaaatctataagaccttttaccgaacggctcaagcagctgcgtgtctgttttgggcctgggatcaaaggactgtaatccagcacatgacgcatacgctttcgctggtcggcagtaaattcatccataaatccatatgaatagtccatcaggttatgcgactcaaactgttcaccaccggcacaaggtgtacgcataaatacatccttccaattaaattcattcgggaagttcggattaaactgttcctcctgccagatgtattgtacataaaggtcataatcattagatttgtcatatgaaggagtatcttcacaatagtcggtatctatacaagcaccattgggtgactcggcaaatacatgacgcaaaccgaaataatgtcccaattcgtgagcaagcgtcacacccgaataagtttgacgtgccaacaattgcggatcgatgtatccagccagcggatcgcgtgccgaacccagaatccacgaactgttcaatgacacacaacgcatatggttcagattttccaacgtaatgttcatatcctctactgtttccattcccggtagcggatgtgatttaggaacaagcgggaaagtggaaatacccagaatattctggtaagtaaagttatagagcaaaatattgacatattggttgggatcccacaataagtgtatatactcccttccgctggtttccattacaagagtcgggtcaatagtaggtgacacccagttcacacggtcaacccccgcttctttcaatacattgccagagggatcggtaatggcaggtacaaattccaatttaatgccattttgagcataagcctgattcgcaaaattaagaatttcataaatattctcagctggaatattttgcgtatcatccgaaggatcattgtaaagcacatggaaaacaataggaatacgataagtcagctcctcaccgacaggcttaccgttttgggtgaacgtcaacatctgtacctccccgcctgctgttaacttcacttgtccggtacggctttcctctgccaagtttccttcaatcattatgtctaaggttgtctctcctaccttaccggcatcaggaatcgtaatccaaggggcatctacactctcagcataccacttggaagcagaattcacatccacttgtatggtagcgccatcatacggaatatccgtaaagtcctgttgggaaagatttatcacaggctcatcatcatcgttacagcttgccagtacaaaacatagtatgggaagcaagtataataattttgttttcattttggtacgtttaatcagttacaaacatgttcttttttctgtcctacgagttgttttcagatgggatttgccaccggaaggtagaatttcttaccccatacttgcttcatggacatttttttcggttcttcaggacgtaaaggaactttcacttcctgtccgtcgttgtccaaacgtgtacccatgcattttctgatgtctatttctttcttggatttttcccaagccggcatttccggcttcatgaaagcagaagctgatttgccattcagctcatctaccaaatcttttaaatcctgaatattaccaacattattttgtgaaggaaccggaatctgagcacgggcaatggtaccgcgctcacctttttcgttcacgccaaacgaataagcaatgaggtctgcaccccaatctgccaccagaaacatatgaggacgacgtgcatccatagacgaccaattcagtgcactggaactgattatttcactgtccggtaattggttcgggtcaagttcatccaatgtaggttcgttgaaaccggaactcgagaaagcctccttcacatcgggtgtactattaaaagacaaagctataatggctcttcctttagtagcttcaggctgaccgaaaatatcacccttctcatcatcaccgttgaaaataccgaatgttttcataccgtctactttcgttgtggacgaaagccctggtattgtaacaaaattctccctgaaatctttatcgctacaaattccttctttgttgaaagtaagtatcatcaacgtatatttttcaccgggtatcatatcagaatagctcatagactcagtacccagataagcactctgtgcaataattgtccaaatagtagcataaggattcagttgctgctgggtttgatacagcacttggttccagctcgacatcagtctgcctttaatgacttccttatcttcgctggcaggataaagtaacggaatataatataccgattcttcgcttggagtcaccttcagagatatctcatccgaagtaacattcaatgtttccacttcaaactcaacagtattcgggtcggctggaggagccggatcaaaatctctacgggccacctttgtacagataccgccttcataaccgaaagccaccatacaatgtttcgttcccggtatcaaaccgcggttttcatattcaataacaccatgtgcttgagcttcaaactgaatccacgggttggttgccacaatatgtctggcaagttcatcaggactcatcttctctgtagtagggttaagctcttcgatgcgacatacatacacctgcttcaagtcggacggcgtaatcttgacatgcgcctttgtttgtctgatattatctacttcaagttcgaaagttgtctctttcatctcggcaggtttcgtcttaaagctcttcattgtgatatcagaaataaacatcagttcataatcggatgtcacataaactgcaatccccatccatatatattcggtatccgctaatatgccgcttcccgaaagttccaactgttggtcaccggtgcgcagtaacatggcaagaacctcatccaatatttcctgagttacatttccatcgggtgccatcatacccagataataatccagttcctggctgaaatagctttgaaggataagcgcctcattcataccctgcgccttggcagcatcaaatgtaggtctgtcgataacgcaacagtaccactgagtttctttattttccggcttcacatcaattatcggattcttgcccgacacatcgacttgcacatcgaaattacaggaaatagggtctaccttccaagtctggaaatagtgacagtgaggtttcttggcagcctccgtaccattaatgccgaaaagtaccagttcgtacatctttccggcaagcagattactgattgtatgcttggaaatagaaccacgatgagagatagttcctaaatattcttcaaaagcaacacctttggcttcagcctgttttttcaaatcctccatcaggtaattatggagttcgggacggggaatcttgtctataacctccttgtccacatacaagcacaaataaggaatccggttactggaaacatctatttgaaaagtatagctggtagtagaagcctccagttccgttactttaaacaataactcatccgggtcgacaggacgtatgttttcatcatcatcagaacaggctgtaattacaaacactgacagcaaacagtacagtgcgataaatattttctgtttcatgtagttcgatttaaaattaagcgataaggtttcattcaaagtactttagcagccattaaccggccgatgagaagaaaaaaggaagaggaagtttaccacactttcctcttccttcttattcaagactgttcacaacagtcaacttatcaataggaaagtttttccaatcaatctgcctttacaggctgcttcatcaatatcccggattctgttcgtccttcaactgcgggttagcatctatttcagctttcgggataggccatgtaaagcggtaatcacctgcctcgatttccagttttgagaaataagaaacagtcgactgcactccagttacctgctctgtatccgagcggttaaagcctaacttccaacgtttcaggtcgtaaaaatgaaaaccttcacctacaagttctttggtacgttcatcacgtattgcctgcctcaaatcgcctgtatcggagaatgtctcgtccacatacccttgaatacggctgctgcgcaaggcattcagatacttggcagcttcaggcgcattgccatcttccagataagcctcggcagcaatcagatattgctcggcaatcatgaaaggttctgaaatattggtataccaattgttggtacttaaaccggatttctgtaagagcggattaccggggaatttgttaaaagtataaataaacatattgggaacaccccattgatccaacgtatactgtctaaaatatactcccgcacgcatatctccatcaccatacagttctaacaaagcagtagtaggatgaaaatccggacgttgtgcagcataaggatagccgcttgctcctaaatattggccatggaaaggcagcccaagtgaacctcccacttcatcaggcacagcctgataaatctgccaaatgatttccgatccctcgtcatacagccacaaattgttcaaagcctcagaagatttcaccaacggatacttaccggtaccaatcaatgcagcagataattcagcagcttttccatactctttcatgtgcaatgctacacgggcttcaaaagcctgtaatgtatgctgggagatataattaagagacttttcactggtaatcatactcttggcacttgtcaagtcttccaatatctgcttgtaagtagctgccaatgtagagcgtcccggatatttttcagcatactgactgggttcatacttcaattgcaagggcaaccccatttgggtttcagcctgattcttgtcgtacacatcacagtacagcaatgccatattgaagtaggaataggcacggacaaaataagcttccccaataattacagccactttctgtaattcttcttccgtaaattctccccgtccttccttagcacgttcataactgtcgattatgtaattggcacgtgcaatcatggtataataattactccaaatagtctcaattgtcccattagcttcttcaatattccaactggacatatcaccataggtattgctgaagaacaccataggcataaaaagttctgtcataaactcaggagccaatgtagccgctccggtagtcatggtccggaaagggtcgtacaatccctgccgtgcatcgacaaattgctgtacattgaccatatatttgtccatcgggtagctggtataggggtctttgtccatgtcgcaagaggaaagtcccagcgcggcggtcaacgccaatacaaatatatttttctttttcattctgaatggttgttaaatgttacacattaaaatttcagttccacaccgaacgagaattgcttggtgttcgggtaatttcccaaagagagatttgaatctacttcggggtcaaaaccagtatatccggttacagtccaaagattacgtcctacaaagaataccttggcatccgaaagcactcccgattttctaatccactgagaaggaagcgtataagatacagtcaggtttttcaaacgcatgaaagcagcattttccaagagatgcgtatcgaactggcgttgctcgttcacaccgggaatatcggtgatgtcacccggcttcatccacatgttaagcatttcggtgctttggttccactgtgatgcatttgctggattctctgtaaagtaacgcacattgttcagcaaccaacgatccaacatgaaagagaagtcagctgccacagtgatacccttccaggagagctgtgtaccaaaacctcccgaccacggagcatactggttctttccggtaaacaccgcatcggtcgaacggaattcttccgtcacattgccgtctttatccagccattgctgtacaccagtttccgggtttacaccatgccatctgttgtaatagaattcaccataagttttgcctgtctgcaatttcaatcctgtgttgggaataacatattcatcgcgtccgtcaaataactccagaatttcattcttattatagttgatattggccttaacgctccagtttacaccagccagattctgcaggatatccactccaaatgctaaatcgaaaccacggttgcgcatagcacctacatttacccaaccgccactgaaacctgtggtataagagaaaggcacgctcatcaacatgtcttcggtcttcttatcatagaagtccaaatccacattcacacgattgaacaaccgggcactcaaacctacattcgcagatttcacaacttcccaagtcaactcgtgatttgctacattgctgggagccgaacctttgtttccgccatagataggtcccatgcctaccaaatccagcgccatataaggtgaaagacttgaagaattaccgatagaaccgtagctgaccttcaaccgcaggtcgtccacccacttcacgttcttcaggaaattttcatttttcagattccacattacacctaccgaccagaagttaccccattggtgatccttggcaaacaaggaagaaccatcacaacgataagctgcatccaaaaaatatctgctgtcgaaagcataactcaatgtaccgaagaaagagttgtacactacatcagactctgcataagtaggaaggtcagccttgctaccggcagatatgtctgaaaaggcaatattcttgatgccgctgacacttgtgccgaaagagtgagctttggaaataatagactcctgacctgccaacagtgtaaagtcatgctgacgggctaccgtaaatttgtattcggccgtattggtgtaagtaaactgataggaacgtccgaagctttcgctggctgtagcattaccggcaaacggaccttctgccaaagatttttgagaaccacgctggtcataatattccattgcctgtgctgcacggatattcaagcccttgataggattgatattaaagtatgtgctggcattgatacggattacatctttgtcgcccggctggatacgtgaaagataatagggatcataaagtcccatgccgtcatagaagtctaacttgtcaccaaatccgataaagtcaccgttctcggctctcaacacttcgtgcgtcatctgagtaggcaaatacatgcttgatgcaaataccttattatataagctattgcccgaagtaccgaaagctgttgtagtagatttctgataagacagaccaatattcacacctgttttcagccatgaagtgatattggcatcaatattcgaacgcaacgtttcacgacgcaggctggagtcatccataataccgtcagtctgtaaatgccctgcagagaagtagtagctcaaagacttggaacctccggttacattcaaatcatactgctgcataggtgctgttccaccgaagaacacatctgcccagtcggtagacaaaccgttatctatataaaaattcttttctgcctgaaaattcacgtcatcctttttatccggatctatcatctcctggagctgataccactgtcctgcattcatggcataattctcgttggtagcagccttggagaaaccatattgtgcagtcagactcacccgtgccttactgccacgcttacctttcttcgatgtaagaattaccacaccatttgcagcacgtgaaccgtaaatagctgtagaagaagcatctttcaatacagtcatactttcaatatcattggcattcaaagcagtaaaagcagcctccgaaataggtgcaccatcaagaatgaacaacggagtagaacttccgctgatggagcttacaccacgaagacgcatagacgatcccgcactgggctcaccacttgaggtaagtacctgcaaaccggctacctgaccttgaagcgcatctcccatgttggcgataggcttattctcaagcttttctccgccaatggatgaaacggagcctactacagaacctaattttttggcggaaccataaccggttaccactacttcttccaataattccgtatcagatttcaacaccacattcacttccggttggatagctacttcctgactttgcaaaccaatgaacgaaacgagcaaggtcttggccgaacccggaacattattaattgtaaacttaccgtctatatcggtcactgtaccaactgaggtacctttaaccaaaacggatgccccaataacaggcagaccgtcttcttccgaagtaaccacacctgtcactttcgagacttgcgcattcaccaaccctataaccactaacaggaaggtcatacaaagcatcaattttcttctcataaagtttctctttaaacgtttaacattgagttaatattttttattcatattgaaacgtgataaaattatttaatataattatatcttcaaacttttttattctcttttttacaagaaaaacttatttttaacattacagagagtatatgtcctataaaattcactatatctatcctgccaatctcataaacaaaggaataaagtaatctgacatttatcccatttaatgcaagagcaaattattccctgtatttgcataaaccttaattccgcaacactattacaaatataactttttaagtacctgagcaacaaaaagttgctcaggaatttgccatgtcagatttttcacctatcttagtgttgcaaatcaaaatatgtatcaaacccgacagacatggcaaaggtagcaattaaatccgagaaactcactccttttggaggaatattttcaataatggagcaatttgactccagactctcatctgtaatcgactcaaccctcggtatgagatgcaggctgtatggttatcaatacagcgaaatcatccgttcgcttatgagcgtttatttttgtggcggctcatgcatcgaggatgtcaccactcatctgatgtaccacctttcgcttcatccgacacttcgcacatgcagtgccgacacgattcttagagccataaaggaactgacccaggataacatttcctacacatccgacactggcaagacctacgacttcaacacggcagacaagctgaatacactgctcctcaattgcctattgtccacagggcagctgaaagagggcgaggggtatgacgttgacttcgaccaccagttcatagaggctgagaagtttgatgcgaagcctacatacaagaagttccttggttatcgccctggcgtggcggttattggcaacttgattgtcggcattgagaacagcgacggcaacacaaatgtccgtttccaccagaaggacacgctgaagaggttctttgaaaggtttgaacaaaacaagcttattatcaaccgtttcagagctgattgcggctcgtgttctgaagagatagtggaagagattgctaaacactgcaagaccttctatatccgtgctaaccgatgcagttcgctctacaatgacatctttgccctcagaggttggaagaaagtggaattgggcggcattgagtttgagctggcctccattctcatcgagaaatggaaagggaaggcataccgtcttgtgattcaaagacagaagcggatagacggcgaactcgacctgtgggaaggagaatacacctaccgctgcatccttacaaatgactacgagtcttccgagaaagagattgtcgaattctataacctccgtggagggaaggaacgcatcttcgatgatatgaataacggattcggctggaacaggcttccaaaatcctttatgggagaaaacacggtgtttcttctgcttatggcactcatacgcaacttctataaattcatcatggcgaggcttgacgtgaagaggttcggactcaaagcaacaagccgcatcaagacgtttgtctttaagttcatctctgtgccagccaaatgggtcaggacatcaaggaagtatgtgctgaatatctattcatgcaacaatgcttatgccaatgtgttccagaatgactttggataacaccgacaacttatagtcgtgattttgcgtattgcctcaagtcgcatggtggggtaaggggcatttatatgtctttatggtgacattcgatgcactgtgccccctttttactaacgatgcagattcttttcgcttctgtatcatattaggcgcgtagttgcggatttgaggataaacaaccgtaaataccctaaaataggcacttacaaacattttttatatggcatataatcagattttcactatcttcatatagcaactatttatacattagtagacaggacagtccaaaataaaagagtatattctgccaagttatgtaatagcatataaacaaaatttatagtattgaaacaatacatataagtgtttatcattgatttataaatggttaaataagccaaaatacattttgctataattagacaaatacatctaataataaagtacgatttgttataaaatatcaaataaaaacgaatttattccactctaagtatgttcagatgtttttagcataattaaaaacaacatttttagattacaattttgactgataatatattggataaatccgacaccttaccggtaaatatgttaaatgtcagggcagaaacagacatccgagtgaaccattatatacaactgtacaggactggctttccatgcctcggcttagatagagtaatatatcagtgaaattttgtgcataaaaaaaaggttgtgaaacacaacctttttttataccatatatttagatttaacgtgctttttgcggagcgcacatcactgtaataggaaggtctattgtaccttctgcaacacgtgtattcgccgccctaccttttttaggaccaggtatcagcggactgtattccaatacgtggcgaacccgcatccgctgttcggccgtaaactcatccgagtaacaataggcatagtccataatgttgtgagcttcgaatgtggagttatcacagcaagtacgctggaaagctttcttaaaattctcctctgtacggaaagaaggatcattctgccattgttcagccaaatcggacaaagtatattcatactctgtcttgttgtacgacttggtatcatcacaatagtcggtatcggcacaagccaattgttccgattcggagaagacatgacgcaaacctaaataatgccccagttcgtgagtcaacgtattttgaatactcaattgctgggcatccaactctccaaattccgggaacagataattggcggaagtcacatagatattattgattgaaacacaataggcaaatttcaaattctccagtttcagatgagaataaggcactgtctccgttccttccatcgggtttgatgatggagaataagggaaagttgacactcccatcacattacccatagttggatccgtagaagtatcgaaagtataaagcagtacattgacatattcattgggatcccataagaaatgattatacttccgttcgttgctgaacattacatccgtcatttccattgtgcttgacacccattgtacacggtcgataccgggttcaggcataaggtttccttgcgggtctgttgtagcgggtacaaactccaagttcatattgctgctgttctctcctatgcctttgtaagcccggttcacacctgctataacgtcttgcaagtatttgccatccgggttctgacgcgggtcagaaggatcgtcataaatgacgtgaattacaatgggcagtttataatgcagctcacttcctgccggtagggccttttgacttatactgatagtacgtgtttcgcgttgtgtacgaagttcaatgataccggtccggtcttgttctatgttgggagaaactgtgatacgcaatatactttctcctcttccttcggtatccgaaagtttacaccaatctacctggctggtagctacccaaccgtcataagctgcaatttcgatactcagttcttcaccttcatgcgacaaatccttaaattcagtttgcgagaggttgaatattccttcgtttgtatagtcatcttcacaagctgtaagggaaatatacaatgccatacaaacatatagagctaatttcttcatattctttttgcttttagattacggttattattcgtttacagttacactgccttcccagcttagctgcaacgttgcaggtttgcgccattttgaatcgggtatagtttcggcttcgattgaaatacggtatttattctctcctgtttctacaatggacagataacctttcgaccggattttccattgggcatccgaatcgtccggagaaacatattccaactggaacccgtcaacataattaattttccaacccgaagtagcagccaaatccgttttagtcttacctatcagtgcttcatcagtaataattaactgtagcatataattatccaactcttggtcctcatattttttaaatccgaatacctggtcgccattactattctttttatatatgacacctttaattgaacaatcggtttcttgtgtaccagatccactattgaaagtaaatgtattggtagcaggcagaatgtccagttcttccacttcctgagatgctccgtaatactctcctgccaatttacttccatctttcagggtggcttcaaaccgtaaatacatcatggcatcctctgcttttacagaaagccgtccttcagtaacttctttgacatatttaccggattcattgtctatcagatagaattgatagccttcggccgcatcataagcatgatatttaccgtcgaagtgagattcaggtactgcaaacatcactgtatatttgccagccgagagtccatgaggagtttccgtttttacacttcctaatgcaaaagttaccgcctttgtttctccttgagcaggtgtgtggaatgcacttagaatttccgcttccgttttttcacctcccattaaagttaccgcaaaaagattttcacagatctgatgtataaaaccgccttcatagctacatgctatggtctgttcggattctgcttgcaattccagcttcagggaagagcctgtgagttttacctccagcgagcctttggtttgattgcccgattgccacaacgcgctttcatacgacaccgttatgccggcagtactaaaatcatttttttgccccaatttatctgcgggtaatgacacccgcaaataattattttcagcacgcattgtcttgatatctttcacatcggctgtaggagaaagatagaatacagcattggcagcctcatcaaaacggagcactgatttaatatccaaaatcttatctttataactgaactgattggtcaaggtaaccttattattatcatcatcattgttgtcggtattgccacccggctggtcatcatcatcactgcaagcggcaagccccatagctatagccagacaaaaggcattcagcatatatatatattttctcatatctgtcaatttagtgtttaatgttatacctgttcaatttaatagctttttcattcagcttgtcttgcacaagactccagtctgtcaaggtcggacaatgcttgccaaacagaactttctcaccgtctatatccggattgtaagcacgcaacggaccggtccagttaccggttatcttgtgttttccaggtgcatcatctatgaaattccactcaaatttaaaattaccgtctgcctgtttctgtaccgttaccttaccttcttcaatggcaggcgcattaatatccatgtggaaataatctccttcttcttcacggaaatgaagataccaacaacctcgcggagcaccatcccataaatagcccgccacagctgttgaggtagtaaagcgttctgcccaactgtgagtatctgtagtataggttccatcgggaatctgtccgttcaatcccaagtctgtggcaaattcaaaaaccatggcatcaccctgagatgcttgaagccagaccgaccacaaatccaactgcttgttgtccgcaccggttatggttcctttccaagtccatgtggcttcctgtacttccggcaagtttgtatttatgtcttcttccagattggagatgaaagcatcaccgccatcatcagacatatcttcgataatcagttctttggtgatgcttcctgacacttttttcttgttatcagtcagcaactcatactcgaatgtataattatttgtattggtttctctgctgactttaacaactcccgaatctatgaatcctgtaccggagtatccgtcggcatcaactttcagtgcatacgtgccgaacggagtaccgttaatgggtattccacccatcagtgtaaatgtcggtccatacccttcagtcaatggcactaccttatattcaccgtcctcaattttcgcctgtaccggattgttggcaaggttggagaaaaggcagagcgccaacatactgccttctttttgcatgtcatcggcaaaaccatcagtatagaaataaaccataaagtttccggttgcagtttcaaacatattaccataatagaatgcctgtacatctgtaaacttcgtgtcaatcatgtccactttaagagtagattccgcgccccaagtatcggtaatatcttcaaactccggcgaaccggcgaaatgatagtaaactattgtaccattggctaattccaactcacaatccatgttactgttgcccgaagcatcgtttgttactgtcaccgtaccgcctgttacagcttcatattgcagtttggcttcacgattcctgataaccattgtattatcaatattgaatgtaaagggattctgtttgaatcctatgcgataggagccttcgggaattgttattttttctccggttgaaggtgtagcataaagatcgattaccaacatgtcgccatcggctacaggcatcggaaagccacgttcgtccaatttacattctgtacttgagagtacaagataatagttggctataccctcaccgattacatcatttcctatatacttattataattttcatctttcaatgtgatttcattcttttcaccctcttccaatgtcgggggaggcaggggaattgcagggtcatcattggaacaaccggtaatgcctgcacagcagaatactgctgtcattgcgagccatatatattttttcattttcgtatctatttataaatctatctatttattgcggtcttgcaaccattactttgggaaggtatcctttgttccagaaggatttagagagacaggaatcccatattgcagctgtctgattcaacttatccggattaaacagtcccttagatacatctgatgccaatgccagggcagcgttgccaacgggtttcattacagctgccagccaaatacaatctcccgtaccgtcaggtaccgtgaaagctaaagaagcatcacctttcagcagaagtttttcaaaaatttcttcttgtgtcataccttccgcttgctgacggaataatgtcatgtaaatttgtacatcagacatctgagtagaagcgttatcataggtagctttaggcaaagcagccatataccaatattcatctttaagtgaaggatttacatcaagtattatcttatcttcttttttggacacccggacatcaaagctacattccactgcatctacgtagtcagtctggaaaaactgataagtcgcctttttcgccggagttgttcctgagatagcaaacaccactaattcataaacggcaccaggtgccagattttctatctttacatgttgtttaccgcgcaaggaaatggattcgacaaaggcttccaactccatattcgctgcctttgcctgacgattcaaatcgtccatcagataagataccaatttagctttgggcacttcctgaaaagtttctgtgtcaacatagagacataaataggggacttttccgtctgatgacagcaaatcaaacgaacaacttgttgaagtactttctgtttttgtaatagaaaattttacatcggaataaggatacagttcagtcaatggtacttcctcttcatccgaacaagagttaaaggcaaacatcaatgccgcaccaagacataaaagaacaacttttagaagattcataggcattattaattaaacaaaataaatttttagcaaaactaaaaaataaaatacaatgaatttttgtactatgtcaaaaaatcatcacttttataataccttttttataaaaatcgttactttatattgatttgttttttcaatctgctcaaataactttgcgtgatacccagataggaagcaattatgcccagcgatacattctttataatttcagggcggttatgagccaatgaaaggaaacgctctttagcgtcaccattaatcacatgattcttcctttcataaaaatagagttgtccatgtgccatttttaatgcccaacgggcaaaatcatgtgactccgccactagtttatcatagtgttgtttagaaatctttataacttttgacgtacagcaggcttcaatctgataaaaaacaggctggtgcccataaaacgagtgcatggaaataagcatagtacccggcaaggcaaatccaaaggtaacctctcgcgttccatccatataggtataacgtaaaatcccctcttcaaccacatagatattcgtatttatcattccacccatcaccaatatctcattccgctttaaaaatatttctgacttaggctctaaaaagctttccattattttatccggtaacggatagtcgcattcttttaataacagctcttttatgttttccattctttatagaagttaaatcataaattgatatttatagagttgcagctttcctcctgccttcttatactttaaaatataatagcttggccacatcttaaaataacaaagtatgaacaaatatgaattaaacaatggcaagtttatagaaaaaaaatcagatgacaaaaattccttgacatgaaaatatagataacagttcatgagaggtaaaaaattcaataagcgtaccgacattgaaagcaatcaggtacaccgaatagtacaccgaaagaatgctttgatatacttatttttgctatgcaccaaaaaacaaaaacccctgtaaaatattaatttacagggattttctttgttttgcaattctttccagcggagagacagggattcgaaccccgggtgcctcgcagcacaacggttttcaagaccgccgcaatcgaccactctgccacctctccaaaacttctttttcaagaagtgcttttctcttaaagcggtgcaaagatagcgcttctttttttaattcgcaaacaaatccggaataaaataattcacatatccgtaaaaactaaaaatacggcataaaaggaactaataaaatgttactaaaatcttttcgtccgacagctgttttattttcgtccaacagttgtcggacgaaaataaaacagctgtcggacgaaagggaaattattgtgggacgaatagatttcagcataaataataatagttgataagagtacagatattaatcggacggacacgaatcaatacccggtggtacttcctacctaataatagctattttatgctcttcaacataaaaatcctccatattattgtgtaattacggaaatttttccgtaattttgcgcgctctaaaggataacatatctaatcacttttattaaaagaacattatggaattaaacaaaacctttattgacgggctttggagcaaagaaatcaatgtaagtgatttcgttagtaaaaacatcacgtcctacaccggagacgcatctttcctgcaaggaccaacggagcgcaccaagcatatctggaacctctgtctgaaagcactggaagaagaaagagccaataacggtgtccgttcattagatcatacaacagtatctaccatcacttcccacaaagcaggctatatagataaggagaacgaacttatcgtaggcttgcagacagatgaactgctgagacgcgccatcaaacctttcggcggcatcaatgtagtggcaaaagcatgccgcgaaaacggcgtggaggtagacgataaagtaaaagacatctttacacactaccgcaaaacacacaacgacggcgtattcgatgtatataccgaagaaatccgttcgttccgttcattgggcttcctcaccggacttcccgacaactatgcacgcggacgtatcatcggtgactaccgccgtctggcattgtacggtatcgaccgcctcatcgaagccaaacaggaagacttgcgccacctgaccggtcctatgaccgaagcacgcatccgcctgcgcgaagaagtggcagaacaaatcaaggccttgaaggacatcaagaccatgggcgaatactacggcctcgacctcagccaccctgccacatctgctcaggaagccgtacagtgggtatacatggcataccttgccgctgtaaaagaacaagacggtgccgccatgtcattgggtaatgtatcttcattccttgacattttcattgaatatgatttggctcacggtaagattgacgaaacttttgcacaggagctgattgaccagttcatcatcaaactgcgcatggtacgccacctgcgtatgcaatcctacaatgacatcttcgccggagatcccacctgggttaccgaagctatcggcggacgcttcaacgacggtcgcgtaaaggtgacaaaaacctctttccgcttcctgcaaacattgtacaacctcggcccgtctcccgagcctaacatgactgtgctgtggagccccgaactgccggaaggcttcaaggaattctgtgccaaagtatccgtagataccagctctatccagtacgagaacgacaacctgatgcgcgaggtacgcaactgcgacgactacggtatcgcctgctgtgtatcctaccaggccatcggtaagcaaatccaattcttcggcgcacgcgccaaccttgccaaagcattgctgcttgccatcaacggcggacgttgcgaaaacaccggaactgtaatggtgaaaggtatccccgtgctgactcacgatacgctgaactttgaagaggtaatgaacaactacaagaaagtgctgacggagattgcccgcgtttacaacgaagcaatgaacatcatccactacatgcacgacaagtattattacgaaaaagcccaaatggcattcgtagatacagacccgcgcatcaaccttgcatacggcgtagccggactttccattgccatcgactcattgtctgccatcaaatacgccaaagtaacggcacgccgtaacgacatcggcctgacggaaggtttcgacatcgaaggttctttcccgtgcttcggcaacaacgacgaccgtgtagaccaccttggtgtagacctggtgtactacttcagcgaagagttgaagaagctgcccgtttacaagaacgcccgtcctaccctgtcgctcctgactatcacatccaacgtgatgtacggtaagaagaccggagccactcccgacggacgcgacaaaggcgttgctttcgctccgggagccaacccgatgcacggacgcgacaagaacggtgccatcgcctctttgagttccgtagccaaactgcgctaccgtgactcacaggacggtatcagcaacacattctccatcgttccgaaatcattgggtcccactgccgaggaacgtgtagaaaatctggttaccatgatggacggttacttcaccaaaggtgcacaccacctcaacgtgaacgtactgaaccgtgaaatgctggaagacgccatggaacatccggagaaatatccgcaacttaccatccgcgtttccggatatgccgtaaacttcgtgaaactgagccgcgaacaccaactggaagttatcagccgcagtttccacgaaagaatgtaatcggtaaaacggatacataaccttttaaagcacggattacacggatttcacggattaagcaaaaatccggagtaacacccctgtagtccgtgctttcttttttactacattctttgcttataatacactattatgattaatgttcattcatacgaatcaatgggcactttcgatggtccggggttgcggcttgtcgtattccttcagggctgtcctttccgttgcctgtattgtgccaaccccgatacaatagatgtaaagggcggtactcctactcccgccggtgaaatcctgcaaatggctgtcagccaaaaagctttcttcgggaaaaaagggggaattactttctccggcggtgaacctaccttgcaggcagaggcattgataccactgttcaaagacttgaaagcaaacggcatccacatctgtcttgacaccaatggcggaatctggaacgacaaagttgaggaattgttaagtctgacggacttggtattgctcgatatcaaagaattcaatcccgaacgccaccgtaccctgaccggacgcagcaacgaacaaaccctgcgcaccgctgcctggctggaacaacagggacatccgttttggctgcgctatgtcctggtaccgggatatagtgattttgaagaagacatacgcaacatgggcgaacagctcggcaaataccaaagcatacaacgggtggaaatacttccctaccaccgcttaggagtgcataaatacgaagctatgggctgggattatcagttaaaagaagtagtagagaatacccccgcacaactggaacgagccgaaaaactctttaaagagtactttcccacagtagtggtaaattgagaattgattctcaactctcaatttaatcagtaagtcaaccgtactccaccctgcaaggtaaagttgcagggattttcttttcgtatagtctcaatgtccgaaccgtcgtcaaagaaataagacactcccggttctacataaatgccgactctgctacttatattatactgtgcacccacagctcccattacagagaattgcagcggtttcacggtttcgtttttgctccctatttttccgtaaacgcatttttccatggcgccgccggcagaaacatacatgataaaggacttcttatctacaaagttccagttggcacgcaaaggaatacccaaataatgcaatttctggctgaccgtttccgaacttccggcaaatttcacatccgaagcgaggtacgtatacgtcaagcccgtttccacggagaaaccccgtgcaagccctttacgtaccgagaagccgaaagacaatggctgtttatggtctatgtccaccacctgtccggaactcctctgcagataaggtatgccatctttaaagacaagctcctgcccttccggcacttccattattccgtcagacattgtggtgaggtctacccttccgccggaaacaccgaagttctgtccgttttgaagcagtccgctttcactcatactgcttcccgaaatcaatccgcccgtatttcctactgccaatccgaccgaccagccacgcgactgctcccgctttgctccgccaaccggcaaatgcaatttgtctctgcctgacgggcggcggcgctcaatcttttccgtacgctcctcttcccttctctcttcttctgctgcttcctgatttacccgtgccgactccgcagtcggtttctgtacgttcccagtctgaacttccggctctgcgcccaaggattggatgaccgtttcccgctccgtttcatctacggtattcagttgttgtgccagcaaggaacgccggttcgtatccgccggagattcctgtttctgtgcgcgatagtcgggttctgttatctctgtccgtactgaaggcgtctgttgctccggcagcttgtccggcacggcagccaatgccggtgcagtcatattccgcatctcctctcccacagggctttggagcagccatacactcaccgacgacaccgcaacgagcagtgtcgcagccgcagctacagcccagcggcggaaaggtataatccgccgttttccggctaccggaggcttcgaaacggacaaatccttctcaagccgctcccagccggaaacgggcagcggttcggaataatcgtccaaccgctcctttatctttcgcatccacaattcatcttccatacgtttctccatttatgcgtttcttttcatccactccttcaccttggcagccaaagcagctttggcacgtaccagttgtgaagccgatgacttttcgttgatacccagcaaccgggcaatctccttatgagatttatcttcaaaaacaaacaggttgaatacggtacgataaccggcgggaagctcgcttataaactgcatcaataccttttgaggaatagtatccaccgccgaagcatccggctcctcatacgtctccggcacatcgtccagggcagcggactggctcatcacatcatttttccgcaaatactgcaataccgtattcaccattacacgttccatccaagcccgcaaagaaccctctccccgccaagtgaacttatcgaaagagtcgaagagcttcaggaaaccgtcatgcatcaaatcctgtgcagtttcccggtcaccggcgtaacgcaaacatacgccgagcatccgccccgcatactgttcgtacagttctttgcgggcaaggttgtcgccttgcctgcaacgttctgccaatacctgttcttccatcctctcttttaacacgtgtttaccttaaaaatgcaacgggtacaaaaatactgcatccggcagataggaaatttattctttattttctttaacattcttataagcagtatttgtgcaatcccggcattttctgaatacaaaacctaaaacagaaccaataacaaaacctctacttatgaaaaagttcagaacgatattagccgcatttctgctgttgttcatcaccactcccgtactgcaatcctgcctggacgattgggatgatgacgaacacccgttgctcgccatcggcacagtgcgaataattgacggaaaagactactacttcgcactcgatgaaggaaccaaaatgtttcccggtgacactgcccaagtggataactataccttggtggaaggacagcgcgcctttgtatatttcaacctgctggatgaagaagtaaccggctacgattacaatgccaaaatcaaccatgtagagaatatccttaccaaagacatttatttcatgcctgccgaaaaggccgacagcatcggcgacgaccgcatcaacatcaacaatatgtggattacggacaactacctgaacatccaataccagctataccacagcaacagcaatgataaaaaacatatgctgaacctcatagtcaacgaagcatccgacggcaagaatgacaaagagggatatattacgctggaattccgccagaatgcttacggtgacgagccgctcatgccgggacaaggacttgtctctttcaaactggataagatagccgaccggatacccggaaaaaccggactcaatatccgcgtaaaaagtctgcacgacggcgaatattacaaaaccattgactttaaaacggacgagaactaaactattctttgcaatacccttttcaatatctttttatttaaagcggagcaggctgtttgccttcactccgctttgttcttttctaccttctgccaccgggtttttgctctatctttttcctgtgtaattctgtgcctgaaaagatacatatcagcctcttcccgtttctggtccattccccttttatcccttatttccccttttccagcgttaagtttcccggcttcggaaattatttcccggcaaaacagtgtgtccttccgtacttttggaaaaaaatcagaatgatatatatatgagaacaaaagtacccgttatcctattgtctgttcttgccctgctgttccatgcttgcggcggcaaggatacccaagacaagcaagagctgtcagtcagcacttcccaagttactgcattgccccaaaacggcaataaagagtttcctttcatagcccggccgttccgcaccagcgaactgtcattccgggtaggcgggcctatcgaccgcttcgacgtgtatgccggtaaccgatacgaacgaggaaacatcattgcagagatagacccgcgcgatttccgcatccgcaaagaacgcgccgaagccgtttaccgccaaagcaaggccgaattcgaacgcatagaggcgctataccggaaagagaacatctctgccagcacctacgaaaaggcaaaagccgattatatctccgccaaaacagcctttgataccgccgtatgcgaactggaagatacccgccttacagcccctttcaccggatatgtaggtgaagtgtacatcgaaaaattccaggatgtcaaggcaacccagccggtcgtatcccttatcgacatacatcagctaaggatagaaatatatgtaccgcaggaaatagcctatgcggcacagtcgtcggacagcatacggatatgcttcgacgccatccccggacagacctaccgggccaagatcatagaggtgtccaaaggcactacccgcaacaatctgtcctatctgcttacagccatattgcccaatgaaggtggtaaactgcttgcaggcatgtccggcaaagcgattttggacacaccgcaggcagagagtgccgccggtttctgcatctcccaggcggcactctgtcaccggccttccacgggcgattatgtatgggtggttaatcctgccacatcgcaagtcagccgccgtaaagtaacagtagccaaattgctgcccgacggactggtacagattgcagacggactgcaaataggagaaaccctcgcaacaagcggtctgcgtttcctctcggacggcatgaaagtagacattacctctaaagacaagtaattatgaaactggtaaaatactttttatcgaaaaagcccgtcacaatcctgctgttggtattagtattggcaggcggattgctggcgtacgtcaaaatgggcaagctggaagatgctccgttcaccattaaacaggcgctggtattgactccctatccgggagcttctccctcggaagtacagtcacaggttacggatgtactggaagagtccatccaggcattgggcgaactctattacctgaaaacggagaaccgtgcaggactgtccaaaatcaccgtttatgtaaagaaagaaacccgtgccgacgaaatgcagcaactttgggacaaactgcgccgcaaagtaagcgacgtacagagcaagctgcccgaaggcgccggtccctctgttgtgaatgatgacttcggcgatgtactgggcgttttttacgggcttaccggaagcggacacagctaccgcgaacttgaagatgaagccaaactgataaagaatgaaattctgaaagtaaaggatgttgccaaagtagagatttacggaacacagacacctacgatagacatttccgtaagtccctccgtcatggcccgtagcggcatcacgatggccgacatcgcccgcgcgttcgaggctcagaacaaagttgtggatgccggcggcatagacgtcggttccaaccgcctgcgtatcgagtccaccggaaatttctattcgctggacgacatacgcaaccttacaatcgtatcgcgcaccggagagcatttccggctcgcggacattacccggattgaagaaagctaccagaccccggcaagcaacctgatgcgcatcaacggacaacccgctgtcggcatcgccatttccaccgttcccaccggaaatgtggtcgatatggcagccgccgtcaaggaatcgctccaacagatgtcgggcagcatgcccgaaggcttcgaacttgtaaccctgtacgaccagggctacgaatcggcagtcgccaaccagggttttatcctcaaccccatcatatccgtacttaccgtagtggcaatcctgctcttttttatcggtttcaaaaacggattgctgataggcagcggactggtattctccatttttgccaccctgatagtgatgttatgcactgacatcgcacttcaacgcatgtcattggctgctatcatcatcgccatgggcatgctggtggataatgccattgtggtgtccgactccgcactggtaaacatgcaacggggcatgagaaagcgagttgccatcatgcgcgcctgttcctccactgccctgccgttgctggcggcaaccgtcattgccatattgacgttcctgcccatttatttttcaccccacattaccggtgaactgctttcctcgctggtaatcgttatcggggtttcgctgatgttcagctgggtgttcgcactgacgcaaactccgttcttcattcaggaatttgtacgccgtccccggccggaagagttgaaaagcgccctgttcgacggaaagtattacaatatgttccgccgttccctgcactgggtcatcaaacatcgctatgccacaatagcctgcatggtcttactgctggtactctctgcatggagcttcaagttcatccccaaagtattcgtacctgcactggacaagcaatattttaccgtagacgtatggctgcccgaaggttccaacatcgacgaaaccgggaagctggcggaagaaatggcagcatatatccgtacacacggggaagcggaaatggtatctaccttcatcggcagaaccccaccccgctattatctgtcgaacgtagcattcggacctcagtccaactatacacaactgcttgtgaagtgccatacttcggaagagtcgcgccggctcaacgccgcattgcaggactctatccgcctgaaatttcccggaccgctcatcaaagtaaacaaattcgaactgagcccgctgacggaagccgttatcgaagcccgcttcctgggccccgacccggcagtgctcgattcgctcgtagggcaggccatcgaaattatgcgccgcaatcctaaagtagcggatgcccgtaacgaatggggaaatatggcattgatgctacgccccgtctacgatccggtaaaagccggcgaactgggcatcaccaaagcgcagatgatgcaatccgtcaaatccatcagcgacggtgtaccagtaggcatctatcgggataacgagaagaaagtccctgttctgctgaagtccgaaggatacgacattacggatgcggcttccctgggcaacttctccgtatggaacggtgaacgctcggctcccttatcgcaagtgacggaacgcattgaaacaacgtgggaatttccgcagatgcgtacctataaccgccagctcagcatggctgccatgtgcggcgtaaaacctgggcacaccatggcagaggtacacggggaaatacgcagtgagatagaggcaatgccgctaccgccgggttatacattcttttgggattcgcagtacaaagaccagggtgaagccatggaagcgattgccaaatacttcccgctggcattcctcatgctgattgtaattctggtggcgctgttcggcaacttccgccagcccatcatcatcctgtgcatacttcccctgtcactgataggtgtcgccgtaggaatgctgctcaccggattcgatttcggcttcttccccattgccggctggctgggattgctgggtatgattatcaaaaacgttatcgtgctgatagacgaaatcaacattcagcgccgcgaaggagttcctgcttacacagccgtaatagaatccaccgtttcgcgtacccgtcccgtactaatggcggccacgaccaccattctcggtatggttccgttgctgttcgatattgctttcggcggcatggcagctacaattatcttcggactgacattcgccactttgctgacgctgtttgtcactccggcattatatatcctgttttatcgtatcaaaatcaataagtaagcatgaagacattctatactttattacttttttatttgtgtgttcaacccgtattttcccagcaggattccctgctggagaaatatagggcaatggctctggactataaccacgacttgcgtgcggcagacaagaacatagcttccagcatggagctgataaaagccgccaaagccgatttaaagcccaagctgtcgggagacgcaaacttccagtacaccggaaatcccatcgaacttaccgtgaacctgccccaaagcaatcctctcactttcgaagggcgtgacatgaaatacggcgcatccctctcgttgatgcagcccctctacaccggcggacgcatccgcgaatccatccggctggcaaagcaccaacaatccatgaatgttcatcaggcggaactgctccactcctccgtatgctaccagacggatatgcaatactggaatgccgtagcccgccgggaactgatgaacatagccacagactaccgcaattcggtcgcttcactggcgcgcactatccgcgaacgcgttgaggcgggacttgtcgaccctcaagacctgctcatggcagaagtcaaactcaatgaagccgaataccaggtattgcaggcacgtaacagttttgagaccggacgcatggcgctcaactccctgatagggatgccgctcgaatccgagaccgaagtgcaggagtccattcccgtagtgcttccgtccgacaacctgtcggcatccgacggaagcaaccgtcccgaactgcttatggcgcacgaccaaataaaaatagccgaaagccagggcaagctgacggactccaaatacaagccgcaactgtatgtcggaatagacggcagctattcctcacccggctatgacttcaaaaccgacctcgaccctaactatgccatatacgccaagttgtccgttcctattttcgaatggggcaaacggcgcaacgaaaaacgttcttccgcctggaaagtaggcatggcaaacgactatctcaataaagtgacggataacgtaaacctcgaaatacaaaccgcccgcacttctcttgcacaagccataaaacaggtggacctcaccggaagttcccttgagaaagcacgtgaaaacgaacagaaggcactggaacgttatgaagaggggaaaatctccatcatggaagtcattgaagcccagaactaccggcaagcctcgcaaataaactacgtacaagccaaagtttcggcacaaagctcctactccggcctgataaaagcattgcacagctattgagttttcccaaaacactataactttgtccctcatgaaatggaataatctgatatacggcattctgttctccggattaggagcgttctcctacttcctgctggtagactacaccaatctgtctcctcatattgccgatgcactctattcccgcggagcgttcatctattttatcctggcattcaatgtgctgggatatgctaccctccgcctcagttcatggattaatacacagtatgccgtaaatatgcgttcacggtggaaaattcctgtcatctatctggcaggcatgtcgctcttcctgttgctgaactacgggctgcttgtaagcgccaaaatactggcgggagcagccaatccgttctccattcagccaagaggatggtggatgctgattaccatctggcttgtggaacttgttgtcttgggattattactggcaaaccgttctacccaaaaggcgttgaggctgcaacaacgggcggctgtattgcaggccgaaaacgacacggcacgctacaccgccctgcaaaaccagctcaatcctcattttctgttcaacagcctcaacacgcttatagctgaaattgagtataaccccaaaaatgcggtacacttcaccaagcacctgtccagtgtttaccgttacgtgctgcaaagccaggacaagacactggtgacgctcggcgaagaactggaatttatccgttcgtaccttttcctgcacgaggtccgtctgggcaactgccttacgtgccaaaacaacgttcctgcggaatatgcggaaaagatgctgccgcccctcacgctgcaattattggtagagaatgtaatcaaacacaattccatcactcccggcaaacctatggttatcactatccgcatcgaagatgagtatctgtccgtcagcaatccgatacaccccaaaaagagcgtcgcatcatccggaataggactggagaaccttgccaaacgttgcgaactgatgtcgggcaagaaaatcattatcaagaacgaaaccgaaaaatttactgtaaaagtccctttgctatatgaataagcctgctattgccatcattgaagacgagattcctgctgcccgcctgctgcattccatgattgcccgcctgcgcccggaatgggacatcaccgtaattcccggcagtgtggaagaagctaccgagtggtttgccacgcatccccaccccgaccttctcttcctcgacatacaacttgccgacggcaactcgttcgactttctttcggcagctcatccctcatccaccatcatcttcaccaccgcttacgaccagtatgcagtccgtgcgttcaccgtcaacagcatcgactatatcctgaagccgatagatgagcagcgtttgcaggaagccattgataaatacgaacacttgcagcagtgcagcaatccccgtcccgacgactatctggcaactctgctggatgccctgcaatccaaagaaaagcaataccgcacccgtttcctcatataccgcgccgaccgtttctggtctttgcaggtcagcgatatagcttatttttattcggagaacaaaatgacctttgccgttacccgcaacaatcaggaacatgtactcgacctctcgttgaataagctttccgaacaactggatcctgaccgcttcttccgtgccaacaggcaaattatcctgtgcatcgatgccatagaccatgccgaaccctacttcaacggaaaaatatcggtaacggtacgtccgccgtataagagtaaaatcacaatcagcgaggagaaactcgccgctttcaaacgctggcttaatttttaattcaaaagaaaggcgtatctttgcacccgattttaccaaactactttctataagcatgaaaaaaggactgctatacgctatattggcatctgtgctatgggccatcgtaaacccgttcatcaagcaagggctcagttatgattttactccgatgaattttgccgggctgcgtttcaccagtgtaggcgttctgctttttgcctatacctggcacaaggggatgtggcaggaaataaagcagcaccgcaaactgttcctcaatctgatattcattaatatgttcatgggttatacggccttttatttcggagtggacttcgtaagcggggctatatcatccatcatcatgggcatgacgccgcttatcaatgtactgcttgcccatttgctggcaagtaacgacaaactgaacggctacaaaatcgtcagcctcatcatcagccttgcaggcctcttgctgattgtagggatgggcagcgacggtgaaccgctggactggaaaggcatcacaggcatcatactactgttgctcagcattatctttcagggctattccgccatctccgtatccgaagagaaaggcaaggtcaaccctatcttcctgaatgccgtacagatgtttttcggtggcgcccttatctacgtcataggactgggcacggaaggttatcactctttcatcggcaagcctgccggattttatatcagcctgggcatcctcgtatttatttccgtctttgcattcagtttctggtttatggcgttgcaaagcaaaggcgcaaaagtcagcgacatcaatatgtgccgccttatcaacccgattctcggagctgtattaagttggataatgcttgcgggagaatcccccacattcagtacggtagcgggaatgctgattattgtcagttcgctggttatttattttaaaggagcggagattgtaaaatacatcagtacaaggaaataaacagaacggctaaagcagcatgatatgattttactcacacaattagaagaaagcatcaggctctttccagaacttcatatccttgcggatagaattatgtgagaaagcacagaaaaatgactataaaaatggcatatgaagtggttatgctctatcatcttcatatgccatcttattttttagggacatttactggatatccctaattatagtatatttcatgatgaacttgatttattgagtcaatttactatagctgataaggtaatactaaataaaccaatgatgatcatcggtgaatctggtgatattgggcagttacaatggtatggtattctattctacactgattacccgctttgcccaatcccctgcttgctttgcacttccattgcatagccgtcctgcctgccatccgatttgaggatatagcgccttgagctgtttcacgctacctgtaatagaactgccgccggaagtggcaaatggaatgacggtcttaccggagaagtcatatttctcaaaaaatgcattgaccggacgaggacacaaatcccaccatatcggataaccgaggaatactacgtcgtaatctttcagattgagtgtctccccacccaatgcaggacgtgaattttcatccgccatttctaccgaactacggcttgctttgttattccaattaaggtctgccgaagtgtaggctacagccggagtaatccgatacagcttaccgttaacagcttgagcaatggcaccggcaattttttccgtagttccggtgcaggagaaataggccacgagaattttcttatcggattgcataccggtatccgttgtctgtttttgtgctttcgatgagcaactgaaagttagtaaactcataattaccaatataaattgtttcattttattatgatttgatttttttatttgtcacgatggggtgacctgagcatctccttatgcctatcatacgtttacgtatatttgttgagacactcgtttcctcaagaagaaagaagaaatagactcggtcgcaattaccgcttatttgtttcgaggttatcatactcttcgtccgtcaccggttcgagccattcattgaaagcactttcaccgggaacctcgaaagccagatgagcaaaccaacagtctgcagcagctccatgccagtgcttgacgtttgccggaatacggataaccgtgcccgggagaatttccacggccggtttcccctcttcctgataccagccgcgtccggctacgccaatcagcatttgtccgccaccacttttggcacgatggatgtgccagttattgcggcaacgaggttcaaacgtaacattggatatattcacctgctcgcgcgaaatgggagcaaggtaactgttgccggtgaaatacttcgcgtatgcagtgttcggttcgccgacaggaaaaatcattccgcgctggaaagcggctttagcatcttcaccaacggcatcttccgcccatacgtcttttgccagattgaacgccgcccatgctttcggccaaccggcataaaaaccgatatgggtaatgatttcggcaatctcagtacgggtaatgccgttcttctttgccgactgcagatgaaatacgagcgaattgtctgtaataccctgactgataagtgaggtaacggttactaaactacggtcgcgcagaccaagcttgtcggtgcggctccacacttctccgaaaagaacatcgtcgttgagctccgcgaatttaggggcgaactctcctaatcgggtgcgcccggctgtctgtactattttctcctgtgtcataatattgaaagttaagatactgaatactgaaattaaaagaatcctgttcatagtcattccatttaccgtatgaagttattgatatttccggttgttttccaattgcaaaattaccacgattacgcaaaccgagttgtatatgatttacggatatttatacccgaatcattgattctgaaattagagaagtatgcaattcaacatatccgaaccgggaatgacgagagcaaataagggaagcaaccatcctcaacaaagcgaaaagagacggaatgccataattaagaacgtaccttattcagacaggcttttactttttattctcctcagtattttagggaactgccagaaaaacagcagcgtacagcaaatggcagccgtagcatcggatatggcttctgccgcatatacacctgctactcccataaaatgcggcagtatcaacgccaacggtatcagcaggattaccttacgcagcaatgctatgaaaatggatattctggcctgccccaacgccacgaacatattctgacaggcacgctgtaaaccgaaaatcgtcataccgcccaagaatacaggcatcgtccagcgaacagtttctatcagccttgcatcgctcgtaaaggcggatgccacaatcgcagggaagcaaatcataaacagcatcaggacgagattgaaagaaaacattgtaatcagcgcaatccggaagcactccttcacacgctgcttgtcgccatgcccgtagttatagcttgccaccggaacaaacccctgcgcaaaccccgtcagcggcacgctggcaaactgcatagacgtttgcaggacggtaagcgcactgacatagatatctccgaattctttcagactgctgttgagcacaaaccccaccaggctttccgtactcgccatgataaaaggcgatacgccgagcgccaacatggagagcacgatactcttttccagcttcatataccgcctttccaaaggcagggaagcgcgccgtgagaaaaggaaggacagcacccacaccgcactgcaagcctgcgacagcaccgtagccaacgcagcgcctttcactcccatatccaaccagaatatgaatataggatcaagaataatattcaacaaagcccctatcaacaccgaacacatggcaaccgcagggcgcccctgtgcattgatgaaagcattcagtccggtagacacttccacaaacagcgtccccaacagataaatggaaagatagtcttccgcatagcccagcgtatgctccgaagcacccgtaaaaagcaggataggctccataaaggtataggctatgaacgaagtgagcaaagtgaaaagaatcaacagagtaaagccattgccaagtatctttccggcacggcgacggttgccctgtccgagggcaatggcagccaacggagcaccgccaccacccacaatggcggagaaagaagaaatcagcacaacgagcgagatggtcactcccactccagccagcgcatcggttccgatgcccggtatgtgtccgatgtaaatacggtctacaatgctgtaaagcagattgacaaactgtgctgccaccgcaggcagcgccatcttgaaaaccaaaggcagcatacgctccgtgcccaggcgttcttcgtacttattagtcatgattggcagagtttactcttattctcttagattctgttgttacggaaaagtgcttatttccggctgacgattgtacccgtagcctgattggtaggcattaccagcacctcagccacttgtatatgctcgggtacggcagcggcaaagtacaccacttcggcaatgtcgtcgcctgtaagcggacggatgcccttgtacacattatcggcagccgccttgtcgccacggaaacgcactacggaaaaattcgtctccaccaaaccgggcttgatgttggtcacccgtacgggagtatccacaaggtcgatgcgcaagccgtctgacaacgcctttacggcagccttgctggcacaatacacactaccgcccggataggcataatcgcctgcaatggaacccatattgatgacatggccgcgtccgcgttccaccattccgggaaccaccagacgggtcatggcaagcaatgctttgatattggtatcaagcacgatgtcccattcgtccggattgccttcgtgttccttgtctacgccgattaccagtccggcattatttatgaggatatctatcgctttccattcttcgggaagcgagtcaagagccgctttcgcagccccgcggtcgcgtacgtcgaaaggcagcagacagacatccgcgcgatattccgtttccagttcgcgctttacggcagtcagcttctctacattccgtccgttgagaatcaggcggtaaccattcatggcaaacttacgtgcacagccctctcctatacccgaagaagcacctgtgatgagtactgttttcttttccatttcttacgaagactttaatgttacggactgcaaagttaggacttatttgcgagtatcggtcaattacccgcaatttataactcatgaccctgttttgggttattcgatttttcttttcccaagtatttccttccatttcttttgcgagttctttggaggcgttttatgagaacaaagcgggtgtgtggcgaataaaaagaggaaacatccgtctccaaagaactcgcaaaagaatgctgaacaatttttaaacaaactctaaagttttcaagaaaatatgtacctttgcgccacttttttttatgactgactatatcaggtagagatttgtttaattagtttggataaagtaagaaacgcttatgcaaaagtccgactgcatcatcggtgtagagcacgtatcgaaatttttcggagacaaagccgtactgaatgatgtgaatttgtctgtccgcaagggcgagtttgtaacgatattgggaccgtccggttgcggaaagacgacactgctgcgtctgattgcgggcttccagacagcttcggaaggagtgattaccattgcaggaaaagacatcacgcagacaccaccccaccgccgcccggtgaatacggtgttccagaagtacgccctgtttccccacctcaacgtattcaataatattgctttcggcctcaagctgaagaagctccccgccgccactatcgaaaagaaagtgaagcaggcgctccgcatggtgggcatgaccgactatgaagaccgcgatgtagactccctttccggcggacagcaacagcgcgttgccatagcccgtgccatcgtcaacgaacccgaagtgctgctcctcgacgagccccttgccgccctcgacctgaaaatgcgcaaggacatgcagatggaactcaaagagatgcaccaaaaactgggcatcaccttcatatacgtcacccacgaccaggaagaagccctcaccctgagcgataccatcgtcgtgatgagcgaaggcaggatacagcaaatcggcactccgacagacatctacaacgaacctatcaactctttcgtagccgacttcatcggcgagagcaacatactgaacggtgtcatggtgcacgaccggctcgtccgcttctgcgaacacgagttcgactgcgtggataccggtttcggcgaccgtacacaggtggacgtcgtaatccgtccggaggacatctacatcttcgaaccctcggatgcggcgcaactcacgggaaccgtaacaagctccatcttcaaaggcgtgcactacgaaatgctggtacagacccgcgaggactacgagctgatggtgcaggattaccactgcttcgaggcaggccgtgaagtgggtctgctggtaaaacctttcgacatccacgtaatgaagaaagaacgcacctgcaacactttcgagggcaagctcctggacgaaacgcacgtggaattcctgggttgcagcttcgaatgcagtccggtgcaaggcatcggtcccgaaacgcccgtaacggtggaagtggacttccaaaacgtcatcctggaggataacgaagaagacggacgactgacgggcgaagtgaaattcatcctctacaaaggaaaccattatcacctcaccgtgtttaccgactgggacgaggacatcttcgtagacaccaacgacgtttgggacgacggagaccgcgtgggcatacggatagcgcccgaaaacatcagagtgataaaacgataagatatcatcccgtcatcttaccgtccataatcctaatataataaagcaatacttgattaaatagagtagcgcttgatataagatataatagagtaatgtttgataagttatcccatttcttcctgcgacgacgcaactggacactgccctacgcactgttcctgctgatatttgcgatagtgccgctactgctgattgtgctgtacgcctttacggatgccgacggagctttcacctttgccaacttccgcaagttcatgatgcacccggaggcgatgaacaccttcatctactccatcggcatcgccctcatcaccacgctgacctgcctgttgctgggttatccggcggcatacatcctcagccagaagcagttcaacacttcgcagaccatggtggtgctgttcatcctgcccatgtgggtgaacatactgatacgcacactcgccacagtggcgctgttcgactttctgaacctgcctttgggcgaaggcgcacttgtgttcggcatggtctacaacttcctgccgttcatgatataccccatctacaacactctgcagaaaatggaccgcaacctcatagaagccgcccaagacctcggagccaaccccttgcaggtattcggcaaagtaatcctgcccctctccatgccgggcatcatgagcggcatcgtaatggtgttcatgcctacggtaagcacctttgccatagccgaactgctgacgatgaacaacatcaaactcttcggaacaaccgtgcaggagaacatatacaacggaatgtggaactacggtgcagccctgtcgctcatcatgctgttgctgataggcgtcaccatcctctttacgaacgaagaggacggcgcatccaatgaaagcggaggtgtgatatgatgacgcgtattcttgccaaagggtatctgtggctgctgcttgcgctgctgtactcgcctatccttatcatcatggtattctctttcaccgaagccaaagtgctgggcaactggacgggattctccaccaagctgtacagctccctcttcacaggcggcatgcaccactcgctgacgagcgccatctggaacacatttaccattgccatgttagcagccaccgccagtacggcgttgggcagcatcgcggccatcggcatcttcaacctgcgcacacgcacgcgccgggtaatgaacttcgccaatgccattccgatgatgaatgcggacatcattacgggcgtgtcgctgttcctgctgttcgtcagttgcggtatctcgcagggattcacaaccgtggtactggcgcacatcacattctgtaccccttatgtagtgctgagcgtaatgccccgcttgaagaagatgaaccagaacgtgtacgaagccgccctcgaccttggcgccactccctttcaggcattgcgcaaggtaattctgccggagatacttccgggcatgatcagcggcttcatccttgccttcacgctctctatcgacgacttcgcagtaaccatattcaccattggaaacgaaggactggaaacgctctccacctacatctacgccgatgcgcgtaaaggcggactgacaccggagctgcgtcctctgtccacccttattttcattacggtgctggtgctgctgattgtcatcaacaagcgtgcggaacgtgcacggaagaaataagtccgcctgcgtctcgcaagataagagtattcgtcccgcagcacggagagattcatcccgtaagccgaaaaacgaaagcatagtcaagataaacctgctgaataaaaaatgaaaagattaacagacatattccttctcctttgcctcgtcctcgcagccgtctcgtgcaaagattcgggtgaagagcgcagccacgtactgaaagtctacaactgggccgactacatcgacgaagatgtactggccgaatttcccgcctggtacaagcagcagacgggcgaggacatccgcctcatctaccaggtgttcgacatcaacgaaatcatgctcaccaagatagagcgcggccacgaagatttcgacgtggtatgcccctcggagtacatcatcgagcggatgctgaagaaagaccttctcctgcccatcgaccgcaacttcggcaagaccccggactatctgcccaacatctccccctacatccgccgggaactgaacaagaccagccagccggaacgcaccaccaccgactatgccgtaccctacatgtggggcacagccggtatcctctacaaccgcaatttcatcacccccgacgaagccggcagttggcactgtctttggaaccccaggaacaaaggcaaaatcctgatgaaagacagttaccgcgatgcctacggaaccgccatcatctacgcccatgcccgacagcttgccgacagcaccgtcaccgtggagcaactgatgaacgataactctcccgaagccatagcccttgccgagaagtatctgaaagccatgaagcccaacatcgcaggctgggaagccgacttcggcaaggagatgatgaccaagaacaagacctggctcaacctcacctggagcggcgacgccgtatgggccatcgaagaagcccgtgccgtgggcgtggaccttgcctacgaagtgccgcgcgaaggcagcaacatctggtacgacggctgggtaatccctaaatatgcaggcaatcccaaagctgccgcttacttcatcaactacctctgccggcccgacatcgccctgcgcaatatggacgccataggctacgtcagcgccgttgccactcctgaaatcatggaagccaaacgggacaccgccatcgcgacacgttccgacctcagctatttcttcggtgaaggtgtgggtgcggacagcctgcaaataaaccccgtgcaatatcccgacaggaaagtggtggaacgctgcgccatgatacgcgacttcggcaaccgcaccgaactcgtactcgaaatgtggagccgtgtgaaaggcgacaacctcaacacgggcatcgtactgctgatattctccgtgtttggagtattgttcgtctggctggtatacggcaagatacgcaaatatcggcagaaacaacgccgccaccgaagacggagaagaagatgattaaaaaatcccgcatataggatttttaatttataatgcttaattttggccttcgataaattcaaaagcacaacgctgggattataattcataaatcttaaatcataaatctaaaaatgcttactcaaattatcaacggacgcatattcaccccgcaaggctggctgaatgaaggttccgtcctgatgcgcgacggaaaaatactcgaagtgaccaactgtgacctcgccctcatcggcgcacgcctcatcgatgccaaaggcatgtatatcgtgcccggcttcgtgtgtatgcacgcgcatggcggtggcggccacgacttcaccgaatgtaccgaagaagcgtttcgcagcatcatcaatgcacacctcggtcatggtgctacgagtttctaccctaccatttcctcgtctccgttcgaaaagctgcaccaggcagcccaagtgtgcgagcagcttatggcagagcccgacagccccgtactgggattgcacatcgaaggtccctacctcaacaagaaaatggcaggcgaacagtttgccgaccaggtgaaggagattgacggacaggaataccgcgagttggtggaaagcacccgttgcatccgccgctgggacgcctctcccgaactgcccggagcactggagtttgcgagctacctgcgcgaaaaaggcatactggcagccgtatcgcataccgaagccgaatacgacggcatccgtgccgcctacgaagccggatttacccatgccgcccacttctacaacgccatgcccggcttccacaaacgccgcgagtacaagtacgaaggcactgtggaaagtgtctacctgaccgacggcatgaccatcgaactcattgccgacggcatccacctgccgtccaccatcctgaaactggcatacaagctgaaaggtgtagagcacacctgcctcgtaacggacgccctctcctgcgccgccaccgaaggcaaggaaatcaacgacccgcgctacatcatcgaagacggtgtgtgcaagcttgccgaccgctcctcattggcaggcagtatcgccaccatggacgtgctggtgcgtactatggtcaaggcgggtatcccgttgggcgacgccctgcgcatggcttccgaaaccccggcacgcatcatgggcgtgtacgaccgcaaaggttccctgcaaaaggataaggacgccgacatcctcatcatggacaaggaactgaacatacgcgccgtgtggcaggcaggaaagctggtgcaggaaaacttcctgaattacaagtaacgtataagaccggccgttttctctttattaaaaggaaaattctctaaaaaaactgcaatggtaaactttttaatgccaacaaatgtattatatacataaatttgcattagtaaaacttgaaccaattaaaaaataaaaggtatgaaaaagatgaaaatgacagcatttctgctgagcggcgccatactactgggtagttgcggtacaatgaacaatacgacgaaaggtggcattatcggcggtggctcgggcgctgcggcaggagccattatcggcggactgttcggtaagggtaaaggcgctgctatcggtgcggcagtaggcgcagcggtaggtacgggcgcaggtgtggctatcggtcataagatggataaaaaggctgccgaagccgccaagattgaaggcgcacaggtggaaatggtgaaagatgccaataatctggatgccgtcaaggtgacgttcgactccggtattctgtttgctttcaactcctctacgctgagcaacgatgcgaaagcttccttgcgcgacctcgccaagattctgaaggaagacacaactacggacatcgccatcataggccatacggacaaggtcggtacgtacgaagccaacatgaaggtgtccaagaaccgtgcctatgccgtagagaattatctgcaggattgcggcgtatctccctctcagttcaagcaagtggaaggtgtgggctacaatgaatacgacgaaagcctgtcggccagcgaaaatcgccgtgtggtaatattcatgtatgccagcgagcagatgattaagaatgcggaagcgggaaaatgataatccggttttcggacataagaacataagaacaaaaagaaaactcctcacgtttgcaacccaaacgtgaggagttttctcttatatcccccggcattttcaaagaaactccagggaaaccgggagcaaatccccggagttataaaatcaataggcgtgtcctttttcatcctgcatctctgcggcatctatcttcttcctgtcgatgctgcgccatgcgtagaaaatgtaggcaagcacaaaaggaaccaggacagatacgtaggccattacccgcaacgtaaactggctggaacaactgtttgccagcgtaagcgaactttgcaggtcggcggtagagggataataggcagtattgttataacccgccaccagcaacagcgccaataccgtgagcacagtgcctgcgcctgcaaaccatatacccttgtcgaaagacggtttccacactgtgcggacaattccccaaagcacggcaagcacaccgataaggaatacgagcagcaccacgggcatttcgataaagtttgtcagatacttatagggttccataaatacttctccggtttccggatttaccgcgtagccttcggcaagcagcgtacggataacgaatgcaaggaagaacaccagaaacagacccgtattgccccacagcgcacgacggcaacgtttcaccaaatccgcatcgccgatattgttaatgaagtaaagcgcaccgagaatacgcgccaggaagaacacagccagtcccaacactacattccacggattgagcaacgcatccaacccgtgccctgcattggcccaactgctgataaccggcatcaccgtatcggcaatattacctttgttgatatagaactccgaacccgtaaagaacgttgccaccgcaccgcccagcagcaccggccctaccactccgtttatcaccagaaaagcgcgatacgtcgtcttgcccaacagattgcccgctttcgactgaaactcgtagcttacagcctgcaacacgaaagtaaacaagataatcatccacaaccagtacgcaccgccgaagctcgtactgtagaacaacgggaacgatgcaaagaacgcaccgccgaacgttacgagcgtagtaaacgtaaactcccacttgcgccccgtagagtttattatcatcttgcgctgctcttccgtcttgcccagacagaatatcagcgagttaccgccctgcacaaacagcaggaatacaaggatggctcccaacagggatactataaaccaccaataatgttgaagaaatatataggtattcatgtaatgagttatgagttataagttatgattgatgagaaagttctttttccggtcctttccgtatggctttcagcataatgcctacttcggcaatcagcataacggtgaacagtacaaggaaaatgaagaatgtggtctgcacggagccgacatccagtttggaaatggcggcacttgtgggcaacatatcctgaatggcccacggctgacgtccgcattcggcaaccacccaaccggcctgcccggcaagatagcccagcggaatggtcagcattgccacccaatgcatccagcgcatctgcgacaaatccttcttgtaggcaagaacgagaaccacgatgaagaagaggatgaagtacccgcccagtatcaccatgacacggaacatatagaaagtgagcggcacgttgggaaccagttcgttcacatccttgatataaccgtaaccgaaatacgccacattctctttcaacactttggcagccacctgcgcctcggcatcgttgcccgcagctttggcggcacgataagcggagaaagccccgatagccgtctttcccttttcaatcttctcctgagcggagagcgcggttgtaccgtctttcaagggatagccgcctttcagcaggtcgttgatgcccggtacgaaagcctttgaatcgcgctcggcaagcaatgaaaggaacttgggaatctccatgcggaagaggaaagcatccttaccgtcatcggccgtcttcttgtcgggattgagaatgccgaaagccaccagtccggctccttcctgcccctgatagtaaccctccatggcagcgagcttcatgggttgtttctgtgccacctgataaccggaaccgtcgcccgtccacgcggaaagcacagcggcgcacagtcctacccaggcagctatctttatgcttgccaaagcaaacttcttctcacggtttttccacagataccagcaactcacacctaccacgaacaccgcagccagtacccagccggacagcacgctgtggaagaacttattgactgccatcggcgaagtggctaccgcccagaagtcaaccatctcgttacgggctgtatcgggattgaactccatacctaccggattctgcatccaggcattcgccaccagaatccaccaggcggagatagtagcaccaagtcccgtaagccaggtagaagccaggtggaaacgtttgcttaccttgtcccaaccgaagaacatcacagcaatgaacgtggcttccataaagaatgccagaataccttcgatagcaagcggcgcaccgaagatgtcgcccacgaaccaactgtaattactccagttcgtaccgaattcaaactccagaatcagtcccgttgccacacctatggcaaagttgatgccgaagagtttcatccagaacttggcagtatgtttccagaacttgtcacccgtacggtagtacaccgtttccatgatgcccataattaccgccaatcctaaagtaagcggcacaaaaatccagtgatagatagcggtcaaggcaaattgcgctctcgaccaatcaatcagagaagtgtcaatgttttcaagcatgagaataaatattaagtatgaaattaaagtataaaatataaagtataaggtataaataaggaaaaggaatacctccctccttaatcactaaccgcttatcactatcccctatcttcctgcccgcataatcagttcactgctgacgtaatcttctttatcgccttctccggcagcttcattcagatagttcggaaagaagaaaagacgaagaataaaaaacatgataaacaatttgattgcaattatcagccacaaggtacgccccaatgtcatgcttcggaagccatcgacatagaattgccagatactggtaacaaggtttttcataaagttcaaattataatcattacaaatataaaatacttttatataaataacaaataaaaaactgaaaagttatagccagcttgatttttgtccggtattctataaagaagttctttgggaaaatatctactgtctttacgggggcaaaactaaaattctcttactattggtttctattaggcacggatttcacggattttcacgataaaaaagaataaagaaaacctgtgttttccgtgaaatccgtgcctaatagaaatcagcaagtgtattttgacacctcataaaaacagcaaagcaaactcttaattatcggcaggaaaaagtaatccgtcggcacaatcacggcaatggtctattgtttttgccgtttcaagaggctgcgcatacttttgcaatggtaaaaccatagaaacaaggtaatatgataaatgtaaaaagattgaccgtaatatcgctctgtgcggcaagcacctgtgtcggcaacgcaatgccgcaaacgcaggaaaccgctatcggtacgcaacagcaggacagcacgcagacgcttcccgcacaatggaacctgcaagcctgcatcgactatgctttgcagcaaaacatcacgatacgcaagaaccgtctcaacgccaagagcgccgaagtggacgtaaagaccgccagggcagccctcttccccagcctcacggcatccgtaagccaacgtatcgtaaaccggcccaacagccagaccaatacgataatagacggcgacaacatcaccagcagccaaagcaagaccagctacaacggcagctatggtatcgatgccaactggacgctttacaacggcagcaaacggctgaataccttgaaacagcagcggatgaacaaccgcattgccgaactgggcgtggcggaaagcgagaacaccatcgaagagagcattacgcagatttacgtacagattctctatgcagccgaagccgtcaaggtaaatgaagcaaccctcgacgtcagccgggcggaatgcgaacgggcacgcgccctgcttgcagcgggaagcatcgccaggagcgacctcgcccaactggaagcgcaggtcagcaccgacaaatatcaattggtaacggcacaagctaccctgcaagattacaaactgcaactgaaacaactcctcgaactggacggcgaaaaggagatgacgctttacatccccacactcggcgatgagaatgtgttgtcgccgctgccctcaaagaccgatgtctaccgctccgccctcaccctgcgcccggaaatcgaagcaggccggctgaatgtcaaagcctcggaactcgacatcgacatcgcccgctccggttacatccccaccatcagcctcagtgcaggcatagggagcacgaacaccaacggcaacgacttcaccttcggcgaacaaatcaagcagaactggaacaactccttgggagtaaccgtaagcgtacccatcttcaacaaccggcagaccaagagcgccgtacagaaagccaagatacagaagcagaacagcgaactggacttgctggacaatcagaaaaacctgtacaagaccatcgaagggttatggctggatgccaacagcgcacagcaacgctacgttgccgccatagagaagctgcgaagcacacagaccagctacgacctcatccaagagcaattcaacctcggcatgaagaataccgtggaactgctgaccgagaaaaacaacctgctcaacgcgcaacaggaaaccctgcaagccaaatacatggcaatactgaacacgcaactgctgaaattctaccagggagaacagattacgctttgacctattcaatataataacccccatacgcaactatctcttgcggtatagaccaacgctacttaaaacccaataatgatatacagaatatgaacaagaaaaagattatccttatcgccgtagccgttgtggcggtagccggcataagcatccggcttttcggcggctccacggccaaacataaagtgacctacgagacagccaccgtaatcaaaggcgagatatcggaatccataaccgccaccggcaccatcgaaccggtgacggaagtggaagtcggcacgcaggtaagcggcatcatcgacaagatatatgccgactacaattccgtagttaccaaaggccagctcatagccgaaatggaccgtgtgaccctgcaaagcgaagtggcatcccaacgcgccgcctacaacggtgcgaaagccgaatacgaatatcagcggaagaactacgaacgcaaccggggactgcacgaaaagcagcttatcagcgataccgactacgagcagtccgtctacaattacgagaaagcgaaaagcagctacgaaagcagtcaggcatcgctggcaaaagcggagcgcaacctgtcgtacgccaccatcacttcgcccatcgacggcgtggtcatcaaccgtgcggtagaggaagggcaaacggtggcatccggtttcgagactcctaccctgttcaccatcgctgccgacctgacgcagatgcaggttgtggccgacgtggatgaagccgacataggcggcgtgaaagacgggcaacgcgtgacgtttagcgtagacgcctatcccaatgacacgtttgagggcgtagtaacacaaatccgcttgggagaggacagctctacaagttccggcagcagcggcacatccggtacggtcgtcacctacgaagttgtcatatccgctcccaaccccgacctgaaactgaaaccgcgcctgacggccaacgtcacgatttacacactcgaccgcaagaatgtgctttccgttccggcacgtgcgctccgtttcacacccgaaaagccgcttatcggcgagaatgacattgtgaaagattgcgaaagcgaacacaaactctggacacgcgagggcaatacattcatcgcgcatccggtaacggtaggtatctccaacggtgtgaatacggagattgtaagcggcatcgatgaaggtgcgacagtagtgaccgaagccaccatagggcgcctgccgggcgaaggcccaacggcggacatgccgcaggaaccaagcggtgagaaaagcccgttcatgccgggccctccgggaagcaagaagaaaaacaacggccgatgaaacagcgtacagagactgagtataaaagtacagtacaaagtaaaccatacatcattaatcatgagcaaaaccgtaattgaacttcaaaacataaagcggaacttccaggtgggagacgaaacggtgcatgcactgcgcggcgtatcattctctatcggcgagggagagttcgtcaccatcatgggtacgtccggttcgggcaaatcaacgctgttgaacatactcggctgcctggatacgcccaccgtaggagagtatctgctggacggcatctccgtacgcaccatgagcaagtcccagcgtgccgtactccgcaaccataaaatcggcttcgtgttccagaactataacctgctggcaaaaaccacagccgtggaaaatgtggaactgccgctgatgtacaactcgtccgtatcggcagccgaacgccggaaacgcgccattgaagcgctgaaagccgtagggctgggcgaccggctggagcacaagtccaaccagatgtccggcggacagatgcaacgcgtagccatcgcccgtgcattggtaaacaaccctgccgtaatcctggcggacgaagccaccggtaatctggatacccgtacctcattcgaaatcctggtgctcttccagaaactgcatgccgaaggacgcaccatcattttcgtaacgcacaatccggaaatagcccaatatagcagccgcaacatcgtattgcgcgacggacaagtgaaggacgacaagtccaaccgaaacattctgaatgccgctgaaacactggcagcactgcccaagcaggaggatgactgacgcagtacgtaaattactttattgcaggatgaaaaaagaaaaacaatatcataaaactacaaatcaatgaatggaaccaaccttttcaaaatagcctttcgggcacttgccaacaataaactgcgtgccttcctcacgatgttgggcatcatcatcggcgtggcgtccgtcatcacgatgctcgctatcggacagggttcaaaaaaaagcattcaggcgcaaatctccgaaatgggctcgaatatgataatgattcatccgggagcggatatgcgcggcggcgtccgccaagaccccagcgccatgcagacgctgaagctcaccgactacgaggcattgcgcaacgaaacgaacttcctggctgccgtcagccccaacgtatcctcatcgggacagctcattgcaggcaataacaactacccctcatccgtaagcggcgtaggcacggactaccttgaaatccgccagcttacggtggagaacggcacgatgtttacggaaaccgacatacagacttccgccaaagtatgtgtcatcggcaagacaatacaggataatcttttccccaacggagaagaccccgtaggacgcattatccgcttcaatcaagtgcctttccgcgtgacgggcgtactgaaagccaaaggatacaacagcatgggcatggaccaggacgacgttgtacttgccccctacaccaccgtaatgaaacgcctgcttgcacagacctatctgcaaggtatcttcgcatccgcactcaccgaggacatgacggacaacgccaccgaagaaatcaccggaattctgcgccggaaccataaactgaaggacagcgacgacgatgatttcaccatacgcagccagcaggagctcagctcgatgctgaacaccaccaccgacctgatgaccactctcctcgcctgcatcgccggcatatcgctggtggtaggcggcatcggcatcatgaacatcatgtatgtatccgtaacggagcgcacccgcgaaatcggtctgcgcatgagtgtgggtgccagaggagtggacatcctgtcgcaattcctcatcgaggccatcctcatcagcattaccggcggtctcatcggtgtcatcatcggctgcggcgcaagctggattgtgaagagcgcagcccattggcctatttatatacaggcatggagcgtattcctcagctttgccgtctgtacggtgacaggagtgttcttcggatggtatcctgcaaagaaagcagcagacttagacccgatagaagcaatacgatacgagtgataatcgcttatcgctaaaaaaaactatctttgcatttgtatgaaacaaattctctactcacggtcgcgcatcatcgaagccctgattcatatcatcggctggggaattgtatttgcttttcctttcgtgatgatgacacgcagcggtttcaccattacatggatggaatacctgcgtcatggcagcattgttccgctatcttttcttatcgtattctactgcaattactgcttcctcattccccgttatctgttcgaggggcgcatacggcagtatctcctgctgaacatactgctgatagcttgcgttacagccggtgtacacttttggcaggagtacgcattccacacctacgcaaaagccgacggtgagggccaaagacacatcggtccgccgaagtggatattcatcatgcgcgatttcttttccatgatacttactgtagggttgagtgcggccattcgcctcagcggacgttgggtgcaggtggaagccgcccgccgcgaagccgaaaaaagtcgcacggaagccgaattaaagaatctccgcaaccagctcaacccgcatttcctgctcaacacgctgaacaatatctacgcactcattgcctttgatacggataaggcacaaacagccgtacaggaactgagccgtttattgcgccatgtcctttacgacaatcagcagaacttcgtaactttaggcaaggaaatggatttcatcaagaactacatcgccttgatgcgcatccgtctctcgtccaacgtcactgttgaaacgcgtttcgatattcgtcccgacagccctacggagattgccccgctgatattcatctccctcatagagaatgctttcaaacatggcatctctcccaccgagcccagccatatccgtatatatttcagcgagaatgtgcatgaagtacgttgcgaaatcaccaacagctaccaccccaagagcgaagccgacaaaagcggcagcggcatcggactggaacaagtaggcaagcgtctggaactgacctatcccggccggtacgaatggaagcacggcataagtgaggacggaaaagaatataaatcggttttaacaatcaattactgacaacatgaatctgaagtgcgcaatcgtagatgacgaaccgctggccctgaaccttttggagagctacgtcaaccaaaccccgtttctggagcttgccggcaaatactccagtgcagtgcaagcgatgagcgacttgccggacaagcgtgtcgaccttctttttcttgatatccaaatgcccgaactcaacggcctggaattctccagaatggtagatacacatacccgtatcgttttcaccaccgctttcgaccaatatgccatagacgggtatagggtcaacgccctcgattatctgctgaaacccatctcgtatgcagactttctgcaagccgccaataaagcagtgaagtggttcgaactgctgcaacagccccaagaggaaattgaaagcatcttcgtaaaaagtgattacaaactgatacaagtggagctcaaaaatattctttacatcgaaggcttgaaagattatatcaaaatctatgaggagaactctcccaaacccattctctcgctcatgagcatgaagtccatagaagaacttctgcctgcttcacgcttcatacgcgtgcatcgttcctatatcgtccaaaaagacaaaatacgtatcatcgaccgtggacgtattgtttttggcaagaactatatccccgtcagtgacagttataaacaaatattccaagattttcttaataaaaggagttaaaaatacccttataggtttatattttattgaaatcgggctatttctaataatatcctattgcatattaaaagatgtttttttacctttgccgcgaacagataggagttgtgaaactcccccaatagaatagtttagttaagtctagtttagtttttgtgtaaagcacttcctccgtaagcgaacgttggaagtgcttttattttaggtatatcaagcagttacgaaaaaagcgcatttccaatatttcgcagcaggttgcaaaatttgattgtcggacgattgtcggacaccgattttattactaacaaattgtcgcaactttattaaacaaaaatatggcaacgcttaaactttgtatcgtacctgcaaaagtgcttatcaacggaaagcacaaagtaagaatatcactggcccataattccaataccaggtatattccaacaaactgtattattgacaccctatcacaattcaaagaggggcaagttatcaatcatccgaaagccgcttcaatgaacatgaaacttcggaatctacttaaccactatcagaatgttatcgacaacatatatgatgtggacgtatattcatgttccgagctccgagaaatcatcataaaaaagaaagactacaccaatgccaagttttcctctgcaatgacatcttatctgtcagaactcgcagaggagaaaagaaacaaatctgaaaagttgtatcgtttggcatgccaatcattcatcaagtcacaaggtgatttgctactttcaatgattacgcctcgaaacatcaagcattttgaaatggaccttgaagacaaacggctctctcctactaccattaaaatctaccttacattactcaaagtaattatcaactatgccaagaaacataatatggtcagatacgaagtagatccgtttgagttctgcagaatgccatcagccaatatccgcgaattagaccttagcattgatgaaataaaggcgattcgagatatggaaattcctaaatacaatatcggagtagtacgtgatattttcatgttaagctattacctgggtggtatcaatcttgtagatatgcttgatattgatttccgaaaagaatggatagaatattaccggcgaaaaacaaagaacaaaaaaagtggtgaaagtaaaacggcattctccgtccagccggaagcaagggaaatcataaacaaatatatgcagaagaatggtaaacttgtttttggtaagtataaaacattcgggcaatgttattctgttgtatcccgtaaaatggaagaactcgccaaaatagcagggataagaaagcatgtggtttattattctgcacgtaaatcattcgttcagcatggattcgaattaggtatatccttagaaattcttgaatattgtatcggccaatcaatgaaaacgaaccgccctatattcaactattttcgagtgatgcgaaaacacgctgatgatgcaatgaggaaaatcttcgacagcttaaagtgattgttcctggacaaaagctattgcttcggcagtggcttcttccctctccttttctacatcagagttcaaacggtctattaactccatatttcccgttatcgcggttttcacgtaatcagaatacgtggctgttagctgataatgaccgtagccaatgaaagcctttgtaagctttggagaggatgattgagatttacccataatgcaacggattaagaagcggaaaaaagaacggttccgctttcccattgcgttacatattctcaaataggaggatacagtgaaaccattaagctatcacacagggggcagaaccgtatatgaataagctactggcaaaatcaatcaccagtagctttacggtcggaattttactattcctcctattcaataaaatatgtaacgcactgtaaatatgaaaaaaatatacgagatagcgaaaataattcatgcaatgtttgtataataatcaaaagattattatctttgtaatgtcaaataacaaaagtaatcaacatgagtaacgaacaaattaaaaaggatttgcttatacaaagagcattcctcaaaaaagaactagaccaactaagatttatcgccgaagttaccggaacaaaccaagaaaaagagattgacaaaaggttagaccggttactgacaatcgacaaactcttaaaagagttggaaaaaaagaagtaaaacaaagcccctctctccggagagggcactaaaaataaatatatggcactgaaagatgaattactggcattaaagccactacttggtacagactctccagagttctataccagaatgacagaaatagcagctaagtacaattcggaagaagacaagaaagctattgccaactttgtatcagagcgtttacagaacattgataagaaactggatgttgtagaagagagcgcaatcaaactacagctgcaagaagtggccgaaatagtctctctaagctatcttgcgaagaaatactttaataaaagtaggtcatggctgtatcagagattaaatggtaatctggtaaacgggaaaccggcacgcttcacacaagaagaattacagacattcaacaatgccctgcaggacatttctaaaaaaataggctcacttagtatctcatattgatactctgttatttgacaccatccccgtagttgagccgctacggggatttttcatatcaattacctatcatcagctcccaattatccataatagtcatatcccaatgcggcacgtcaaattcattattgaccgacaccccatatacagaaagactcttgccggcaccgtcaaactcaatcaaagccgtttcttctcctttctggatacgaagattcataaagtctgtcatttgttcccaatcggtaggaccgatgaataatgattctatgaaacgccctttcacgggtgcaccaatggcggtatccttaatgcgttccaaatatgataaagcctcgttgtaagtcatgggaacaaagatagcaaaatatagtgaaaagggacgactattcagtcaccccttctttatgttagtattcaaaaactatagctgagagatactgaacattcgtgaagaaatttatatgtacctcgtgaaggactaatcttgtgtccatcgaaacatacatttcttcgacctgaataagggtcctgattggaaatcgtatagcccaaggaaaaagccaactggtcaattcctaaagaaagagcacttttaacacgccaaaagacaacatcccctcccttattgcgaactgacctaaactctccctttatctttccaccttcttcagtataatgtgcatatgaaaaagcctcgttgggtaatgtcagaatcaatgccggctcacattgaagaaaaagctgataatccctttcacgccccaagctcactgaaggagtcctaaaattagtacctatcaaccaattcccccgcagtagtttaccgtcatcatagagtgtatacttctgacctttgccgtcactcacctctgtattaggcttataatcattgtccatccagttttgaaaagcaagaccggtcataacgccaatatatttccctatgtaacggatatatgatacctcaagccctaaagctggttcagaaccatatgcaaatagagaaccggatagagacaaaacatttttattagttttaaaatccccttctctctcaccggcaaaaaggtgaatgaccgacaggcataaacaaaagataaaagcaatttttttcatttcaatctaaatataattggctgacaccaaaatttaaaaaaacatattcaactgctataaagataactgcttttctgaaattccctacgtgatttgagggagtttttataaaaggaaaggcccaaatgaaacaaaatcccaacggaagtcagggcacgtcataaataggtctgaattgttactgaaatatgaataaaaggaaaggcagcttattgggttgctttacctatcaaaaccttacgatgtaagaacgatgaacacctattacctaatcccaccaagaaaacaacttgtaagttctgattttattatatagataccatgccttatatcttcttaattcctctttatgaataatttcaatatcataatcatctgttgggaatttgaatagacagaaccttgatgcatttttagtgttaatgtacaaattcctacaagctattacatgtggactttctaccatttcatacataccgtcatctctacgtatagtcttcattcctgaaaattccaacagcaaattatccttttcgagcacaatatccaataggccaatgcaaagttgcaagtctcttgccactataggcattttatccgaacgcgtacactttttaaagtattcatacatttctattattttcttgcgctctatttccaataaaaacgtataatcccaatcaaaatccttttctaaaagcctgcaccacgaattaatctttgcacgtttatagttggactcagacctatttcttctctgtttcatatctaatactattattatttgttcttactttcagataatcatatctgagcttatatcaactcagatataaaaaagtaggtactggaatacttttaactaatcatttcttgtataaaaaaaacgtcgggagacggggcgaatacacactaattatttttcatcttgcttttattttctctttttgcataccaaggatgaattattggcaataaacaagaagctaatactaatactatgccaaatataattaatataatagaaaatgcaagatacatattggaagtgaagaaattaactcccacagcaataagcacagttcctataatattgacaatcgctaaaaatattgattgtggcaatgacatacgtgagcacttcaaatcttccaattctactgttagtctttgtatttgctttgcttgagtattcatattgttaagcactattgtaatgcctactttatttttcatcaaatcttccacagacacgcaactgggtaaactatattttagcccaccctctacattattgtcgaaactaatcctatcctcattcatttctcttcaattttcactttcccggattcagttggttcaaatatgactgtagtatctctctgtaaccaagtgtaattcaaagcaattggcattttagggtttgacatagctgtaaaatgctctatatgaaaagcaaatgacaaagatttaccattatagtttccaactttataaggtgtacttgatgctaatgccacagaatcctctaaatacaaatgtatttctccgatattcatatctttagcattcattaaaaaaacaacgtttttccctaattcatcagcacctttatctcgatgaataataactttataagttaacttaccaaaagtaaacacaataggataaccatccatacagacaacagagccactttctaaaacattgtaatctcctacttttatttccatatttatatgttttttcacaaatatagatattaaagatctaattccgtaataaattgaagacaaaatttcgtttcctattaaaagcagaagttagaataaaactaagataatactctttgccatttgcttcttgaattaaacacggagatggagagtaagtgttttccccaaaaacagttcgtatcagaagttttttccaatacctcttattaacgatgtaaagagaagactcatttgattccatatacattatctcaatatgtattccatcacattcaactgaaagaggtatattctcttgaagtaagaaattcccagactgaactacactatattttccaattttaatcatatcaccattgccataaattataactcaccccaccaccgacataaaaaccacccggatagccatatcctacctgcaaccctaatccccaacgcttcttcttcggcttgacaacaaccggataatagatgtcattcgttaccgtctgataaaccgtcttaggaaagacttgcatactatccagccgcggatctacatatccgctcaccaccgcacgatacagactatcttcatacacaacccgtttgcgatgaagcaaggtatcgcctatacgtacagtgtcattcggcaatatctgccaaaagaccgctatcggtgcggagataagaaccgtatcaagctcgacaaccgtctgtatcttcgtctcggtacggatttctgccggcaaaagctcgtgcggacggaaacaaaccgccacacaagcgattgccaacaatacaactaatagccagggtagttttttcatagcttcagtacctgattacggtttctaccgtccgcccgataactcacatgcacccaggcgaaattactctcatcaatcaactggtcgaaaggaaggttcttgcgaatatactcgaacaatagcttgttctgctgtctgtctccggtatcaatgtccgccgcctgcccgctcatgtgctggctggttgtcgcaccgccaactgccttattcaatgccgggcaacggtaaccgctgttcacaacgataggtttgccataccattcgcgtagcgggtcaagaacgttatctaccaatgcagtcagattggcttctatatcacagccacatctgttgtcaattcctttgcggtcggcagttgtcgaacggcaaagttcttttatcgtaaaatacttcatacatcatttgatttaatataaacatacactacatttgcagaagcctttgtttaaactttaagtttatgctaaaaagggaagggagccgttgcgaaacaccttccttcccacgaattaataatcgctcggtggcttccgcccgctacatccccggacatcgcaccgctttgcttccagctttatcttctctatctccagtgtagcgttcttttcggtcagctcgcggatacgctggcggtcttcattcttctcggcataaagctggtctattttggaatcaagttccactaccctgtgttcctttttctcgtacagttccttccattcagcagcatacgaggtgatattgtcagcttccgcctttctcgcttccgcagccgccttgcgcttcttgctgtcatagaacatgaacacaccgaaaagaggaagcaggatagtagtgactatcccgccggtgatgttgaacagttcattcagttcctccatcataccttcatccccgttacatgttcatcactccaccccttggcattccaaccgagaagaatgccggcaataaacgcaccggtactcacaatgcttgcccaaaacggtacatactggtaataagccagcagacctacaatcacggccaccacaacagccaaaacaatcagtttctttttcatctacgaacttttttaattaaacaaaaaagcccacgaacgcatcctgttaaagacacattcatgggcgttaaccaataaaacatgacaaatagactcatttacaatcacttttcagcgaaagtaaacaagaaatttatgagtagggaatatcttaccaggaaagggttgccaaactatggcagtagatttatcgcaatgtatattactgcaaaactacagaatcttattgtggaattgctacatggttttctccgaccataatccctttcactataattatatttgttaaactgactataaatatttcttaattagagccatatctgtattcttttggaaatcacctataatagtattatcatgagacggtttctccttgcctatctcttcctccgaccaatatgactgaatagatactgtccattggggttctggctttttcccttttaccataaacaactcattggctataacaagataatcacaatcactattaggaattttcctataatacatattcttatctgcacgtaattcgtcacatctttcatttacaacacatgtaaatccaaaatcattaaaaaattgaaacataactttttttatttagtgaatagaatatcgcaaatatacaaaacaaaatacactgcataaatacaccataaagaactattttgtacgtttttatatatttctgagaaaacatatttatttcacctggattatagattacaaaaaaggaaacttaaaatcaggacttaaaaaaatatttataatccagctaaatagtagttttagtttttgtgtaaagcacttcctccgtaagcgaacgttggaagtgcttttattatagacctattaaatactaattttatgaatatcaacttcttccgattaatcgtctgtccatttgataacttgaataacaagacgtcctatccacacttgcagctgatgctctatcaccccatatagctgggctgtactccgaaccaataccacagccaaagcataattccacccaaccagacgaaagccacatcaatataatataacctcaatatcctactgatcaacacacccaaaagttcgccacaaagtacataagcagcaaccatggtaaccatttgttcgttagctatttttattaaaaccaaagttcctataacaggaataagagatgtgcaatctataatgaattgttgtctgtcgctcatataaacaatgtttgtaattgaagtacaaatataaacattatttacataaaatcgtcctatagaacggaaacacataacgaaactgagaagaattatcattacaattataaaaaaagaagaaaaaaagatatttttagcggtcaacgtatccgtatttcaaccctttcgctctttcattgttataataataaacagtaattatatgaattcccaattctcggacatacgaaaagaatataaaaaaggcaagctcacccggaatactatctcagagaatcccttcgagcaattcgcccgctggctcaacgacgccctgcattgcggcgagaacgaaccgaccgccatgattgtagccaccgtctcaccggacggacggccctctacccgcaccgtactgctgaaaggcgtggaaaatggtaaactcattttcttcaccaattacgaaagccgtaagggacggcaactcacagccaatccctacatctccctctctttcgtttggcataagctggaaagacaagtacatattgaagggaaagcagagaaatgcactcctcaagaatcggacgcttacttctccacccgaccctacaaaagccggatcggcgcaagaatatccccccaaagtcacgtcatcagcagccggatggaaataatccgcgcttttgtaaaggaagctgccaggctgaccggacagaccgtaccacgtcccgacaactggggcggttttaccgtcacccccacccgcttcgaattctggcagggacgggaaagcaggctgcacgaccgtttccaatatactctccatgaagaaaagtccgtttccggcctatcgtgtccaaactccgaaaaatgggagataaaccgccttgcaccctaaatcggactgtcaaagtattatatcctatgaataaagtttaaaatgagaaacaaagtcataatactgctgttagaggggaaaactttaatagaaaataattatgaattacggaatcagtgttctctttcgcaccatccctctgctgatggccctgttttgttttggttacggagcttttgtacttgatatgggaacggacccggcaaaaaacgttgccggtccggtagtaatgtcattaggaatgatttgcattgccttgtttgcaacagcggctaccattatccggcagattattcacacatacaacacggttgtccggtatgctttgcccgtgcttggctatctggctgccctactgactttcatctgcggctgggaatatatcagcgaagctgccaccgccagtcatttcgtagccggacatgtaatctgcggcgtagctttcatcactgcctgtgtggcaacgaccgccacttcttccacccggttcacccttatacctgccaattcccaaacgacggaaaacgatgtgcccccacaagcctttaacggcacacaaggtaagcttcttatagttgttgcgacattgctggcacttgccacttggatatggacattccagctgcttgcaaaaagcgatgtgcacaacacctattatgtagcaggacatgtcatggcaggaatagcctgcatctgtacaagcctcgtggcattggtggcaactatcgtacgccaaatacgtaacagttactcgcatgcagaacgtaaatggtggcctgtaatggtacttgccatgggaacactcagcatcctttgggggctactgatactgaaaaacccgaaccctgccgaatcttccatagggtatataatgataggcctgggattggtttgctacagcatttcaagcaaagtcatactcctggcagcaatatggcgcaacactttcaaactagcaaaccgaattcccttgatacccgtatttaccgcactgctctgtctgttcctgtctgctttcctttttgaaatggcaagcatacacgaagtctactttgtaccggcacgtgtactggcaggattgggcggtatctgcttcacactcttctccatcgtaagcatactggaaagcggaacctcaaaaaggtaaccgcttatccgtcaatttctatgtcggtaaagatgtccacatccgcggcatgatgcgccacgtaggcagccggaccggtatcgcccgatttcagaatgtcataaacaacttccgtcttgttcttacccgttatcaagaatataagctttctggcactgaacagcagacatcccgtcatggcaatacgcggctgcccgttataaggatttatgctcttttcatacggatgaaaagaagagagcagatactcctgaccgggaaaaatggaagaagtatgtccgtcatcacctgctcccaacagcactatgtcaaaggtagggaaaccccggcgcaaaggaaccgtactggaaaccaaatccgaataacgtttcgcctcttgcgccggactacggcaatcaccatgaatggggtatacatattcatcgggcatgcctacctcttgcagcagcaaacgcagcatagtaccgtaattactgtccgagtcgctgacggatacgcaacgttcgtccacccagaaaatccgcatccgcatccaaggagtctcttctctgaactcatgcgcccaaatgtcaaacataagggaaggagtcgttcctccactgaaagcaaggtaaaaaatccgctccggctcccggttcatcatatcgattatataccggataagagcacgtgcagtcgaggttgcagcaggatatacataacttttcataattcacaatattcatcagtattcgtcaaattcttacacgggttagtccattcggccccatgttcgcgcatcatagcttcactttccaaaggtccccacgttcccacgggataaccgtaaagcggtgcatccggatgttcctgccaatacttcagcacaggattgaaaaaacgccatgacgcatctacggcatcgctacgggtaaagagtgtctggtctccctgtatacagtcttcaatcagacgggcatacgcgtctccggcgggcagaccgcccaaatcggaataactgaagtccatcatcacctgtttcacatcaaaccccggtcccggaactttcattccgaacttcagcacaataccctcattgggctgcaaacgcagaatcagtttgttggcacgcgggcagtggccgccttcacaacggaacatctgatgaggtgtctcgcggaagtgtaccacgatttcggtcaccttggtcggcatctgttttccggtacggatatagaaaggaacgccgctccaccgccagttgtcaatgcctattttcatggcaatataagtttcggtacgggaatcggaagctacgttcttctcttcacgataaccgggcttggtcgcagacgcggtatattgcccacggacaatgtgctcgttcaggtcttcttctgtcaagggagagagagattcatatacttttaccacctcgttgcggaaattatcggcattgaaaactgccggcggttccatcgcggtaagcgctaccaactgaatgaggtgattctgtaccatatcacgcaatgctccggttccttcataaaaccctccacgctgttcgatacccaaattctctactgcggtaatctctacatagtcaatgtaattacggttccaaagcggctcgaagatgccattggcaaaacgaaaagccagaatgttctgcgcagtctctttacccaggaaatggtctatacggtaaatctgatgctcctcgaatacggaagcatagatacggttcagttcacgggcagattccaaatcataaccgaaaggcttctcgacgatgatacgcgtatgaggacggttcaggcgggcagtcttaagatgaagaggaatcacaccatacagcgacggcggtgttgccagatagtacaacatgccatccggctcctgctcacccgtcagttcccggagacgggcatccagatttccataatcggcagcctcggccggattaagcgaaagatagtacagatgattgcaaaaatcagtcatacgtccgccggcatgttcttccgaagccacaaaacgttccatttccgtccgtatataagtacggtaggtatcatcccggtatccggtacgtccgatgcctaaaacagcaaaaccttccggcaggcggttatccttgtacagattatataatgccggtattaacttgcgctttgtcaggtcaccggaagcgccgaaaattatcatcacaaatttactcatagctttatgtttgtaggggaatttcagtaatcttcacactaaagaaagactacacgttataggttcccgacttcgtttctccgccgtgtcctgtccagttttcatggaagaactgcccacgcagtccgtccacacgctcaaaggtgtgcgctccgaaataatcgcgctgtgcctgaatcatattcgccggtaagttgacggagacgagtgaataaaaataattcaatgccgatgaaaatgcaggaaccggaagttcctctttcatagcctgtgccaccagatgtttccaaccggagagcagttgtttcatctcattgctgaaataaggagtaagaagaagatgctgcggtttctcactccgctcgaaagcggctgcaatatcattgaggaagatactgcggattatgcaaccgccacgccacatacgggcaatggaagccaaatcgaggttccatccgaaagagtccgaagcacgttgcaatacagcaaagccttgagcataagacaccagtttggatgcataaagcgccgaataaatatctcctaccatttcggatttgttgtataccacctccgtgcgccggcaggtaaaatgcccggcagccgacttccgcagttctttctgagccgacaagctgcgttcaaaaacagccgtagcaatcagccccaacggcataccaagctccatagcattgattaccgaccatttgcctgtacctttttgtccggctgtatccagtattttatctatcagataaccgcccgacttatctttatgctgcaagatattagcagtaatttcaataagatagctacgcaatttgccctcattccattgcgaaaagaccgaagacatttctccgttatccagcttcagcaggttcttcatcacccaataggcttcagaaataagctgcatatcgccatattcgatgccattatgaatcatcttgacaaaatgtcccgaaccggccggtcccacccactgacagcaaggcgtgccgtcggatgctttggcagcaatactctgcaaaacaggcttcacttcttcccaggcgcttaccgaaccgcccggcatgatagaagctccattcaatgcaccctcttcaccgccggaaacacctgctcccacaaaacggaagcctctcgcttcggccaatgccacacggcgattggtatcttcatagttggaattaccgccgtctatcaatatatctcccggagagagcaacggaaaaagctgctccatcagttcgtctaccgcactaccggcacgaaccatcatcattatcttgcgcggaacggctacagactccacaaaacgagctatatccgtatatccttcaatacttttaccctgtgcgcgtccgtttataaaacgttctaccacaccttcttcaatccccggaaccgtacggttataaaccgaaacccgccagcccttgtccgccatattcaatgcaagattctcgcccatcacggccagccctatcagtccaatgtctgttttatttaaattctccatatacttgtataatttatctttgttattaaaacaaaaaataacgtctgtttgttcgtgtcaaatttgaaattaattcatttttttcataaaggattgacacagaaaaacgatgtcatatccgcttcccggcaatcatccggacgctactctcggtataaagcaaaaataatctcaaaatcatttaccgcattggctttgttgtctcacaataaattacgatttttgcaggacgaaatatgcaacaatcaaaaaaagtataataccagaaacaatgaaaaaagctctaatctccggaataaccggacaggacggttcgttcctcgcagaattcctgttgcaaaaaggatatgaagtacacggcatattgcgccgctcatcttcgttcaataccggacgcatcgagcacttgtatttcgatgagtgggtgcgcgacatgaagcagaagcgaactatcaacctgcattatggagatatgacggacagcagctcgctgatacgcattatccagcaggtgcagccggacgagatatacaaccttgctgcacagagccacgtaaaggtctcgttcgatgtacccgaatataccgccgaaacagatgctataggtacgctgcgcatgctcgaagctgtacgcattctcggtctggaaaagaaaaccaagatatatcaggcatctacctcggaactgttcggcaaggtacaggaagtgccgcagaaggagactacccctttctacccgcgcagcccctacggcgtagccaaacaatacggtttctggattacaaagaactaccgcgaaagctacggaatgttcgccgtaaacggcattctcttcaaccacgaaagcgagcgccgcggcgaaaccttcgttacccgcaagattacgctggctgccgcccgcattgcacaaggattccaggacaaactgtatttgggcaatctggatgcacgccgcgactggggatatgccaaagactatgtggaatgtatgtggcttatcctgcaacacgatacgccggaagacttcgtgattgctaccggagagatgcacaccgtacgcgaatttgccacacttgcctttaaggaaaccggcatagaactgcgctgggaaggcgaaggcgtgaacgagaagggtattgacagccaaaccggtaaggtactggtagaggtggatcccaaatatttccgtccttccgaagtggaacagttgctgggagaccctaccaaagccaaaacgttactgggctggaatccgcagcagacaagctttgaggagttggtacacatcatggcggaacatgacatgaagtttgtacggaaactgcatttgagaagcaaagaagactgaaacagataatttaatttttcagacagaagaacaaaagaacatatatatatgagaaaataaaaaagagtataaaccgaatatgttcttttgttcttctgtctgaaaccaattcattttataacaatgttacacaagaacgcaaaaatatacatcgcagggcatcgcggactggtaggctctgctatctggaaaaacctgcaagagaaaggctataccaatctcgtgggcagaacccacaaagaactcgacctgctggacggtgttgccgtccgccgtttcttcgatgaggaacagccggaatacgtattccttgccgctgctttcgtgggcggtatcatggcaaacagcatctaccgtgccgatttcatttacaagaatctccagatacagcagaatgttataggcgaaagtttccgccacaatgtcaagaaactgctctttctgggcagcacctgtatctatccgcgtgatgccgaacagccaatgaaagaagacgtactcctcacctcgcccctggagtacaccaacgaaccgtacgccattgccaaaattgccggattgaaaatgtgcgagagtttcaacctgcaatacggcacgaactacattgccgtcatgcccaccaacctctacggtcccaacgacaacttcgacctggaacgcagccacgtacttcctgccatgattcgcaagatacacctggcccactgcctgcaacaaggcgactgggatgccgtacgccgtgacatgaacctgcgtccggtagaaggaatcaatggcagcaacagcaacggagagatactgaacatactttccaaatacggcatcagcgaagaagaagtccggctttggggtacgggaactccgttgcgcgaattcctctggagcaaggaaatggcggatgccagcgtattcgtcatggagcacgtagacttcaaagacacctgccaacccggagacaaggacatccgcaactgccacatcaacatcggcacaggtaaggaaattactatccgccggcttgccgaactgattgtcaacgttgtgggttatcgcggaaagctgaccttcgacacttccaaacccgatgggaccatgcgcaaactcaccgacccgagtaagctgcacgcattgggctggcatcataaaatagacatcgaagaaggtgtagagcggatgtaccgctggtatctggataacaataaataggctcaaagggggaatttgcataaaatgctttttccccctaaaagtttgtattctctacataaacccttatatttgcacaattttcaactaaatgtgcaatatataatggaacaaagttttatcgcctatatagagaatagtataaaggaaaactgggacctggatgccctgaccgattataagggagccaccctgcaatacaaggatgtagcccgcaaaatagaaaaactgcatatcatttttgaagcgagcggcatcagaaaaggcgataaaatcgccgtctgcggacgtaacagttcgcattggggagtcactttcctcgctaccctgacgtatggtgcggtcatcgtgcccattcttcacgaattcaaggcggacaatgtgcataacatcgtcaaccactccgaggccaagcttctttttgtaggcgaccaagtgtgggaaaatctcaacgaaagcgccatgccgttgctcgaaggtatcttcatgatgacggacttcaccctgctggtctcgcgcaacgaacgggttacttacgcccgcgatcacctcaacgagatattcggcaagaaatttcccaagaacttccgtaaggaacacatcgactatcacaaagaccaacccgaagagctggcggtcattaactatacttccggtactaccagttactcgaaaggcgtaatgctcccctatcgcagcctgtggtccaacacccgattcgctttcgaagtactgccgctgaaagccggcgacaaactggtatgcatgctgccgatggctcatatgtacggattggcattcgaattcctgtatgagttctccgtaggttgccacatctactacctcacccgtatgccaagtccgaagattatcttccaggcattcgccgacataaagccgaacctcatcgtagccgtaccgctcattatcgaaaagattatcaagaagagcgtattgcccaagctggaaacgcctaccatgaaactgttgctgaaagtgcctatcatcaacgacaagataaaagccaccgtacgcgagcaaatggtacaggcattcggcggcaattttgccacagtcattgtcggcggtgcggcattcaaccaggaggtggaacagttcctgcgcatgatagacttcccctataccgtaggttacggtatgacagaatgcggtcctatcatctgttacgaagactggacgcgcttcaaacccggttcctgcggaaaagccgctccgcgcatggaagtgaagattctctctcccgatccggagaatatccccggcgagattgtctgccgcggtcccaacgtcatgctgggctactacaagaatgaagaggctaccgccgaagttgtggacaaagacggttggctgcacaccggcgaccttgccctgatggatgccgaaggcaatgtcaccatcaaaggacgcagcaagaatatgctcctcggtccaaacgggcagaacatctaccccgaagaaatagaagacaagctgaacaacctgccgtacgtagctgaaagcatcatcgtacagcagaacgaaaagctcgtgggactggtatatcccgactttgacgatgcctttgcccacggcctcaacaacgacgatatagaacgtgtcatggaagagaatcgtgtggctctaaatgcagaactgcccgcctacagccagatttccaaaatgaagatatatcccgaagaatttgaaaagacacccaaaaaatctatcaaacgcttcctgtatcaggaagcaaaaggatgatgaaatagtaattagcggttagtgattagcgattagtaggctgtgcagtatattgcgctaattatttaccgctatttttaatgttaatccctaaccactaatcactaaccactaatcactaaccactaaccactaaccactaacctctcttttcccgatgaaaaacgaattgttattatctgctgcgctgcttccgttatgtggaatggcaggagaagtacacacaaggccgtcaaatgaaacggctcctgttacggacaagcgtccgaacattattttatttttagtagatgatatgggttggcaggacacatccctgcctttctggacacaacgcacccgctacaacgacacgtaccatacacccaatatggagcgtttggcaaagcagggcaagatgttcacgcaagcctatgcctgtagcatcagttcgcctacgcgcgtcagtctttttacgggtatgaacgctgcgcgtcaccgggtgacaagctggacgttacgcaagaataccacccacgaacagccggactccgttatgatataccccgaatggaatgtcaacggtatctgtcaagaaccgggtgtggaacgcaccacgcaagtcacctcgctggcacaagtgctcaaggacaacggttaccacaccatccattgcggcaaagcccacttcggagccaatgacacacccggagccgatccgctgaaaatgggttttgacgtgaacatagccggccatgcggcaggctctcccgccagctactacggcatgcagaacttcggaaacaaacccggcggaaaaagcccgctggctgccgtacccggactggaaaaatatcacggcaaagacatattcctctccgaagcccttaccatagaagccgagaaagctttggacaacgcccggaaaacggacaagcctttcttcctctacatggcccattatgccatccatacgcctatccagcccgacatgcgtttctaccaaaaatatctggacaaaggacttcccccggtagaagcagcgtatgccaccctgattgaaggcatggacaaaagcctcggcgacctgatggactatctggacaaaaacaacctcaccgacaacactgtactgctcttcatgtccgataatggcggactggctgcacatacccgtgcaggagagctgcacaggcagaactatccgctcaacagcggaaaaggttccgcctacgaaggcggggtgcgcgaaccgatgattgtacgctggcccggcatagtagcggcagaaaccaaatgcgaccattatctgatgatagaagatttcttccccaccattctcgaaatagccggtgtggagcactacaatacggtacagaaacgcgacggcatcagcttcctgcccctgcttacgggcaaaggtaaaatgccctcgcgcgacatctactggcactacccgcacagttggggtccttccggtccgggcataggcgccacctgctccatccgttccggagaatggaaactggtgtactacttcgacagcggcaagcacgaattgttcaatatccctgccgacatcagcgaaaagcatgacgtagccgccgagaaccccaaacttgtaaagaaactatcaaagaaactgagcaactatctgcggtcggtggatgcacagcgtcctgtattacgtgccaccaaccggttggcaccctggcccgatgaaacattataaagaattatgaaacgtatatttccacttatctgtctgtccctgctattggcagggacaggccatgcccggacagaccggcaacagtctgcccgtaaagaaaaaaacggtatcaacctttccctttggaaaaatctttccacacagcgcacggatacggtcggaagcacattcttcaatctcggtatcttctcggcgatgaaccgtttgaacggcttgggagtaaacgttttgggagctgttacgggcagagacatgaacggagttcaaatctccggtatatccaacatggtgggtggaagcatgcggggcgtacaggtagcgggcatcaccaatatcaacggcaataacctcagcggtctgtccgtttccggtcttgtgggcatcacgggtaatcacgcacggggaatggtcttctccggccttgccaatatcacgggcgataacagcaacggagtgattgtaggaggcttgctgaatattacaggcgaaaagactgccggcgtacagctttcgggactcgccaatatatcgggcggtaatttttccggtgtcaccatgtccggactgctgaatgtggtgggcggcgatatgaaaggactccagattgccggtctgggcaatatcacaggcggtacgtctgccggcgtgcagctctctcccctgaatgtagccgtccgtgccaaaggccttcagataggtttggtaaactactacaaggagaagctggacggtttccaactgggactggtcaatgccaacccggacaccaaagtacagatgatgtttttcggcggcaacaccacgaaactgaaccttgcagcccgcttcaagaacaaactgttctataccatcctcggtggcggtacgcatttcctcgacttcagcgataagttctccggtgcgcttttctaccgtgccggactggaattgcccgtctgcaagcaactgttcatcagcggcgatttgggataccagcacgtagaaactttcaagaataaagactatggcttccctgcccgcctctattctctccaaacccgtatcaacctcgaataccgtctgacggcaaaattaggagtattcgttacgggcggttacggttgggacagatactacaacaggaatgccaacttcgacaagggagccattgtagaaggcggtgtggtgttattcaaatactaatccggcactattggcaagaacacttgtcatgtgttttttcaagcaatgcaagcactcgtaacccacagctatatcagaaaatctccttttctttgataaatcccgttctatatgccaccagcaacttcttcaaatcctgaatctgcgtcacgagctgcttgcccttatcggtgtccttcaccatcatacgctgcgagttgaattcgataacgaaggttgtggacttgatatcctgtccctcttcaatcgctttctgacggctctggaacgggtcgtgctgcaccaactgcatgccgtgcgagtgatataccagcgtatagcccgcaatacccgtttcgggctgataggctttggagaaaccgccgtcaatcaccagtaactttccatcagcctttatggggcgttcgcctttaatcgtcttcaccggcacatgtccgttgatgatatgcgaatgaggtcccggttccaccccgaactccgccaggatattgtcgcaaatatccgcacggttgcgaagcgtgtagtaataacctttattctctttatgcaaagccttgtcggctatgaagtaacgctcaaaggtagccatcttatccttgtcgaaagagggcgcatccgggccgcaccacatataccacatataatccaacgcaaaattcttctccgccgaaccatcctcgtcaaagtaggcggtacggataagctggtcggtcttttgcagcagtttatgcccccaatactctttcgttccgatacgtacatgcttgaaacttccgtcctcattcaggggcacggatgcgtgataaagcaggttgctgttgcacaccagatacatgccgccgtacgtaaacaggcaacgcatatgcttcttcagcttctcgctgttcatgaacgaagcatgaatcttttcaaccagctccctttcttcatctgtcaggcgatacgggtcggcagggtcaatagtcgggaaattggcatcgcgcagttcgtattctttgccttcgtacacaaatacgccccgttcaaagtcaatcttgtgcagcagtttccggttgtccatgtcaaactccggacgccggtttataatctccgcttccagtttgaactggattatcgtaatcgccttgtgcatctgcgtaatcagccgcagtgtcttttcgttgtaattggcatcggcaaagttcatcttcggagcaaagatagtgcaaggatcatccgcataggtatccatcgcaaaggtagccagcggcagcagattgatgccatagccgtcctccagtgtcgccaggttggcatagcgcatggacatacggataacgttcgctatgcaggcgtcattgcccgatgcggcgcccatccacagtatgtcatggttgccccactgaatgtcgaaattatggtagtcgcaaagcgtatccatgatgatatgcgcacccggaccacggtcgtagatatcgcccacgatgtgcagcgagtcgattgtaagccgttggataagcttacacatggcaatgataaagtcatccgcacgcttggtcgagataatcgtactgataatgacgttgatatacgcatgcttgttaggctctacgctggactcgtgcagcaactcctgaatgatataggagaactccgccggcaaggctttacgcactttcgagcgtgtgtatttggaagatacgttctggcagactttcaccagttggttcagggtgatgagataccagtcgtccaggtccgtttcctgttcctttatcaactgcaacttctcttccggataataaatcagcgtacagatttccttcttttcgctttcgcgcagcgtatgcccgaagatttcattcaccttccgctttaccgcacccgaagcattcttcaatacatgctgaaaagcctcatactctccatgaatatccgtaaggaagtgttccgtacctttaggcagattcagaatagcttccagattgataatttccgtactggcatcggcgatggtaggaaaactgcgcgacaacagttgtaaatagcgtaagtcgttgactatactttccggagtaatagttcccatgatacgatttatgattttagatttatgatatatattcaattatcagcaattaagctctttctgttatttctcaattttcaattctcagctctcaattcaacaggaacatcagcagcacctgtgctatgattacccgcaggaacatacacatcggatacaccgttgcataagccaccgacggattatcgcccggaatggtgtcgttggcataattcagcgccatcgggttggccatgcttccgcacagcatacctgccatggagccgaagtccaccttcatccatttaaaggcaaccactcccactatcagcaccggaacaacggtcagcacgaaccctgcggcaatccacagcagaccttccggacggaacaccgtatcgaagaaatgcgctccggcatccagtcccagacaagccaggtagagcgacagtcccaatgcacggagcatcaggttggcgcttcgtgtggtataggttatcatgtgcattctcggcccgaacgtaccaatcaggatacctacgataatcggtccgccggcaagtcccagcttcaccggagcactgatgcccggcagggaaatgggaatcgcacccaaagccagacccaggatgataccgataaacaccgctaccagattcggttctttcaggctcttgatggcatttcccaatactttttccacattctggatggcggcagcctcacctaccactgtcagacggtcgcccaactgcaaagtcagttccgcggtggcaagcaactgcacgccgctacggtacacacggctgatgttgataccgtaatgattgcgcaggtgcagcgaacccagtttctttccgttcagttcgggacgtgtcaccacgatacgctgcgagatgagctggctgtctatggcattccagtctatatcctctttgttccagtcggtatgttcctgttcaccgaacagtacggtcagtgccggagcatacttctccgaagtcaccaccagcaagcggtctccttccctgattatcttctcggaagtggggatgcttacattgccgtcccgccacagacgggagattacgaacttcggataattcaagccgcctatctccttgatgcttttatcgaagatggccggattgtgtacttgaaacgccgcaatgtaagttttgttcgcatcgtccttctctttcaactccagatcttccttacgcgccaatgccttgcgtattatcagcacggcaaaaataacgcccactacccccagcggatatgccacggcacatcccaaagccggcgtactggcttccagccccatttgcttcaatgtctgctgtgccgcacccagcgccggcgtattggtggtagcgccgcagaggatgcccaccatgtccggcaacgaaatattcagggtataactgcccaatacggtcatcagcgtaccgaggagcactactcccagcgccagcatattcaactgtaccccgcccttgcggaaagagctgaaaaagcccggccccacctgcagtcccagtgcatacacaaaaattatcagtccgaaactttccgcatagttcagcatctgcgggtcgatagacagtccgaaatgtccggcaagaataccggcaaagaaaacaaacgtcacgccgagggaaataccgcaaatatgtattttccccaaccctaatccgatagcggaaatcagcgagagcaccaccaccgcctgcaatgcggagtgttcgacaaacaaactatatagccattccaaagtgttacggttttatctacatttagaagtgcaaagataggaagttccgcgaagcctaaaaaaagaaatgcaggaaattcacgcaaagctcctcatttcccgcctttcacttgtgcaaaacatcttttatcactacattcacggcatgaaacgccttatcatacctattatatgtatgctcctgtcgctggcgggatgccatgaacgtaaaccgctccccaaccttgagttcgcggacagcctgctgaccgatgccggcgataaatccggagctttgcgcatcttcctgcaaatcgaagagcagctgcaaagccggcaagacccttacaataaagggcttctctacgaacgcatcggcagtatatactacggacagatgaactacgtccgcgcctaccactacttcaagcaggccagagaaaattttcaagtatccgacagtcttcgtaaggaaacggaagccacgcttgatatggcagcctcatcctaccgccagaaagatttggaacgtgccatcaggctgtattcggctgccctcgaccttgccgatgagcaggcagacgagcgtcttgccggagcagccctcagcaaccttgcctccctttatgtaaaatcgggcagaaaacaaatcccccaggacctgctgctacgcatcgaacagtcggcacgcaaggcatcccgctacggtccccacaccatgatagacgtccagcttctcaaacaccgtacggacagcgcgcgccactacctgcaactggcagaggcgcaagacaatgacgtgctcgacctggccgaactgcaatacacagcctaccggatagaggccctctccggaaacttccggaaagcgaccgaccatatacaccgctatatctacctcacggactccctcacccgctccaccatgcaggtctccgccggtataacggagaaagagtatttccaggaacaatccgcctttgccgaataccgaatgaagaaccgcatcttctgggaaaccaccgttacctgcggcatattcatcctcgccggaatagccgtttatatcatccgccagcgcctgcgcatccagcgcgaacgcaacgaccgctacctgctgctggcggaagaggcccgtgccgaataccgggcgctcacccggcaactggaaggacggcagaacacggaaaaacggctgaaaagcctggttgcttcccgcttcgacatcctcgacaaactcggaaaaacctattacgaacgcgagaatacatcatcgcaacaggcagccatgtttcaggaagtaaaacggataatcaccgacttctcggaaaacagtgaaatgctccgggaactcgaacaaatggcagatacctgccatgacaacgtcatgcagaaactccggcaggactttccggcaatgaaagaaaatgacatccgcctgctctgctacatcttcaccggattctccccgcaggtaatcagcttgttcacgaaagagagcgtggcaaacatatatgcccgaaaatcccggttgaagtcgcgcatcaaagcagccggaacgccccataccgacctgttcttatcccttttcggatagatgtcagagccgtgttagaaaaaaacaaagcctcatttcataatacactgtaaaacagtagcataaaaacatacctgttagatttacacattcaaatcgtaactcccggaagagccgtattcactatctttgcaaccggaacaacgattaaaaatgtgtaagaatatgaagaataagattatttttttagtatgtgcggtcttcctgacgatagcatgcgaaaaggaacagcacacaggaaaagaaagccgtgtaagcgtaaccgtttatgacgaaaacggaaaagcgatgcccggcattcccgtaaagatgtatgacgaaaaagactacaaggcattcgagcaagataacctcacgcctcccactgccggcgcaaccgccaatgcgcagggtatcgccctgttcacgctgcccggcgaagtatggttctccggacaatcgcagcgcttcctgacatttgtcgtacaggaaggcggcggtccggacaactaccgtatatggtccgtcgggaaaacgatagatgccggaaaaaacatacagcttgaaatccgcctgacttccgccctcacccccggagaagagcagccggaagacaaaggaacactcatcgggctgtccattgcacagccgcctcataaaatagcatatactttgggagaaccactcaatttggacggactcctgctgaccggcgtatatagtaacggcaaagaatatcccgtcactataactccggaacaagtcagcggcttttcttccgatgctccggcagaccggctggtactgaccatcggcatagaagaccgtcaggcaaccttcaccgtcagcattgctcccatccgcgtacaggaaggcgtactgacagaaatatataaaggatacagcgaaatcacccttcccccacacgtaacagccattgcaccggaagcctttatgcagaacaggcaaatcaccagagtcgtgatgaacgagggactgacttctatcggcgaaatggccttcttcaactccggcatacaggaaatcgtattcccgtccaccttgcagcagcttgcgccggatttgttctactactgcgaccggctgaaacgggtcgacctctcgcacacccaaatcacccggattcccgaaagcgctttcgcatgctccggagtagaagaagtattactaccgtctgcactcacagccatcggaacacaagcattcatgatgacggaacatctgaaatccgcagtaatcccccaaagcgtcacacatatcggtatggaagcattccggggaagcggcatcaccactgtacaacttcccaacagcatctccaccatagaagcacgtgccttctacctatgccccaacctgacggaagtatccgcatacggtcctgcctcaagcaaccatccggatgccgtaatcaaagagcactaccttgtaggctgccccaaccttgcccgctttgaaattcctcaaagcataagcatcctggggcaaggcctgataaccggcaacccaaaggtacatacactgaccattcccgcccgtgtcacccgcatcgacttttccgctttcgacaacacaggcataaaagaggtcattgtagaagccctcacaccgcctgccacctccgagggcgaatggtacggatttccggaaaccataacaagcatttccgtacccgcacaagccgtcgaagcctacaaaacggccgaaggctggaaaaagttcgcggataaaatcagggcacgctcctaagcaaacccgagcccggcattagactctctctttaacattataagaggtcgtgcaaaatgcacttgatttttttcaggcacggaaatacaaattacacggaaaacacggattttctttattcttcttccgtgaattccgtgtaatccgtgttttccgtgcccgaaaatatacgctgctcccttagaatctgtatgcagctcctatattgataaccccctggtcgaaatcgcttaccagctggtatctgaactcaaaattcatcgcccagttacgaggcagtgcaaattccgctcccgctcccagatttacaccgaaccggcattcgttatgattgccgttatcgtcgatatgcacatggccttcgtccatatcaatatcaaagtcgtgcatgtcgaacatccagttggacaatgtcaaaccgaacaacggataaagcttaacgctcttggccaccggaaacagatagtgaaaattcacgttcaaatccagcatgcttacattgtcattctcgaagaaatagttgaaagacggctctatacggataggattggtaatattgtactgatacttgatacccaacccgatactttcgatttccgttccgtaactcaggccaaaacctatcgcctgttttcctttctgtgcatgggcactacccaacagcacaaaaagcaatccgaataaagttaatacttttttcatacgttcattttttattaatttatttaagttagagtgtaatattcggcaaaattaatgttttaattctatttaggaaataatacgcattatatatttcatacgccacaaccgcccggattttgattatctttgcatgctgaatatacacctattttataatattattttatttattgcgaaaaagaaatgaatttacttttattgaacactcccgccaccggtgggaaactcgaacaggcattggaaaaactgatagattttggaatggatgccggcaaggacatattaatcgccattttaatctatgtaatcggacgtttcatcatcaggcagataagcgcgttggtagccagaatactcgaaaagcggaagattgaaaccagcgtgcagaccttcctgaagagcctgataaagattctgctgaatatgattcttgcctttgccatcatcggcaagctcggtgtggaaaccaccagctttgcggcgctgcttgcatccgcaggtgtggctgtgggtatggcgctttccggaaacctgtccaactttgccggcggactgattatacttattttcaagccgttcaaggtaggcgactacatagacggaccgggagtaagcggcacgataaaggaaatacagattttccataccatactgtccaccctcgacaaccgtatgatttatgtgcccaacggaagcctcagcggcaatgctgtcaccaattacagcaagcaggacaagcgccgtgtcgaatgggtgttcggcgtagagtacggcgaggatgtgaagagagtaagagccgtgctgcaacgcatcatcaatgcagacagccgcatattggacacccccgcccccctcatcgtcttaggttcactgagcgcaagcagcgtcgacatcacggtacgcgtatgggtaaagagcgccgactactggaatgtactgtacgatatcaacgaaattgtctaccagacattcaatgaagaaggtatcggattcccgttcccgcaactcaccgtacatcagtcgaaagagtaagaaaaaaacagaggatgttccccaagcactgcgttctgccgcagtcgggaaacatcctccttaaatatcctcttcaaatatcaccggcccggttcaggccaggcaccggctcattcctttccgccggcaactatcttccatgccccggcactcagcaccgcaccgataaacgggcctacaatgaaaatccacaactggctcaaagcctctccaccctgaaagagcgcagggcctatactgcgagccggattaaccgaagtaccggtataacggatgcaggccaaatgtacaagtaccaaagagagacctatggcaagtccggcaaaattaccggcgcccttcttggcatcggtagtgcccaataccaccagtacaaacacaaatgtaaacacaatctcggccagtagggcgcccgttacggaaactccttcctggcaggcattggcgcctgttccgctcacacccgaattggaagtcagcacccaaagaacggcagaacctaaaatagctcctattacctgaaacagcatatacatgccggcatcctttccgctcatacgaccggaaagcaggcaaccgagcgttatcgccggattaatgtggcagcccgaaacgccaccgatagtataggccatagccaccaccgacaatccgaaagcaagcgccgtacctattaccgtggccgccagattagggtcggccgatgtgcacgacagactgactgccgtgccgcagcccataagaacgagaaccatggttcccagcatttctgcaatgtactttttcataacatcaatttattagattaaacttaaggcatcccgatataccttatatataaggcagcgtaaccggataccaacggtacaaatataaaatttaagcagcatttattcacgctttaacataaaaaaagaactcaattattcattatagcggaaaaatcattcataaattcctttaatcattttttaacaatatcggcttacggctttatcaaattacagttataactttgcatgtgattaaggaaaggaagccactccttgcccaatatttacagaacgaattacaaaatgaaaagccaaaccaagaaaatactcaaagtgtccggtatcatactgggagcactcacagccgttgcaggcatactgattgccgtagttctgaatttcatattcacttccgagaagctgactcccatagtattggaagccgccaaccgcaacctgaacgccaagctggacatgaaaagcgtggagcttacctttttctcaacattcccccgcttcggagtgcaactgaccgacggaaccctggtttccaaagccatccgcgacacgctgtggcaacggaccgacaccctggtatcattcaaaaaggccgtagcggtggtcaaccccatggactacctgcggcaacagaaaatcagcatccaccgcctggcactggaacatgccgatatctacgcctataaaaacaaagacggcattgccaactgggacatcaccgttccggatacggtacagtccgcctcttcacctgccggagacgccatgaacatcaacgagctcgacatccggcaaatttccatccagcacgccacggtaaccatggacgaccgcgacacacgcattttcgccaacctatgggacacagaccttaccctgaaagccaatatgaagaaaggccattccatgctggcggtagatttccgcaacaagaaccttctcttctggcaagacgggcagttgttggcaaaccgcatcgccacccacctgcgcaccgaccttgaactgaataccgcccggcactccctgctcctgcacgatgccatgattgacatcaacggtacgaaattgggagtaaaaggaaccgtacgccgcgacaccgcagcccaagcgctcgacgtcgatttgcaatacggactgcacaccccctcactggaaaccgtactgcacatgattccggagagcatcctgaaaaaggcggaagtatcggcaggaggagaagtaagtttcatcggcacgctgaaaggcatgtacggcaagcagaagatgccccttgccacgctggacatcaggataaaagatgctttcgccagatacgccgggctgccttacggcatagacaaggtaaacgccgacttttccgcccggatagacctcatgcggaataccccctcttgcctgaacctgaaaatcttccagctcaaaggcgccgacaccgacatattggccgatatgaaagtggacaacctgctcaccgacccggacatcacctttcatacccgttccactgtcgacctgaatacgctggcgcagattttccctcttcaggaaggcatcggcatggagggaaagatgaatgccgacctgaaactgcgttgccgcctgtccaccctcaagaaacaggattggggacggataaaggttcaaggcaaaatcagaacggacaaactcgtgctacgccatacccaaaagaatttcgagttcacaagcaacgctacgctggactttgccggcaacgaatggctcggagggcgtgttgaaatcaaggatatgacgctccgctcacctgccctgaactcagccacggaaagctttacggcggcaatcagaacctatcctacccaagacacgctgcgccctgccaagacggaatgcaagatagagatgaacaagttgagaatatccctagcggattcgctcgacctcttttgcggaaaatcatccgcccgcctcaagctgcaacccggagaacacaaccctgccaatccgcagatagggcttacactggaagtggacacactgttctgccgcatgggcgacacccgcctgggaatggacaaagcaggcatcggaataacagccgagaaagtacgcgattcgctgtggacacccaaaggcatcatcggtttccaccgcatggcgttccgcaccccggaatgtgcgcttcccatacaggtacagaaaacttccgtcacggtaaacaaccgcgtcgtcaccctgcgcaatgccaccatgcgcatcggcaaatccgatatcaccgccaccggttcgattcacgacctgtacggcgccatgcaacatcacaagcttctgcgcgccaaactggacgtatcgtccgaacagttggactgcaaccagttgatacggtcaatatcgctcccgtcggatacgctggctgcggaaagcgatacggtctccaccgaagtaaagctgttcgtcatccccaagaacctggattttgagctgcaaaccgatttcaggaaagtctattacgagaaagtcacattcaacgatgtccgcggagctgtggacatccgcaaccagtccgtctacctgaaacaactcagcatgaaaggcatgggttccgacatgaacaccactctcgtctatcaggcaaaatctccggaagagggatttgccggtttcgacttccggctgcacaacatcaacatcgggaagctggtagacttcgccccttccctggacacgattgtccccatgttgcgctcattcgaaggaacggtcgatttcaatgtggctgccgccgcttccctggactccgccctgaacatcaaaatccccaccatgcggtcggccattcatgtcaagggagacagccttgtcctgatggacggtgagactttcgccgaaatctccaaaaaattcttcttcaaaaacaagaagagaaacatgatagacagcatatccgtaaacatcggcatcaaagacggaaatgtaaccgtctatccgttcgaaatatcaatggaccgttacagagcggcggtaggcggcacacaagggctggatatgaagttcgactatcacatctccatcctgaaatctcccattccgttcaaactgggcctgaatatatccggaactctggacgatatgaagttcaagctcggcaaggctcgctacaaagatgcggtcacaccggcagaggtacataaagtcgatagcgcgatagtcaatatggggcagcaaattgccgaggatttcaaaaagattatgaaaaggtaaattttcagcgaatcgctaaaaagacaaagaaggaatgccgaaagacgcttgatatttttttaggcatggaatacacggaaaacgcggattttctttatttttttccgtgaaatccgtgtattccgtgcctaaaaagaaacattcagtaaatgtctctaaaaagtaagatggcatatgaagcgtaagcaattagtaaaccccgtcttgcaaggtctataaacataaagagatgcctcttaaaaattccgacttttctcttaaaaagtccctatttttacgagacatctcttagtttttacgagattcttaaatgataccttgtttctttaaagagtgtggcaacagatttaccagatccttggagtagtcactgtcatattcatggacatggttcagaaaataattcatccactgcttgaagtccacgtctgctgccttgcagcatcccatcagggagtagatgacggcagcatcttcagcagcgtcgtgattgccgcagaagagataattcttgcgtccgacagctacgggtcgcacactgttctctatcaggttcgtgtctgggagataccttccgtccatcgtatacctcaccaaccggcgagagttgttcaggaagtagccgatggcttttcctatgggactcttcggaagcacatttccctgctcacagatacaccacttctcaaaagcgcgtatgatgggataggcaagccgcttcctcagctccatgcgctggagggtatccatatgctggtcgtctgccatgctctccacatcatacagcatgccaatctgggccaaagcgtattccgccctcgccttgtcatgggttaaagccctgtcaaagtaccttcgggtatgtacccagcatcccaatgtcgttatgccttcctgtttttccaggatgttgtatccggcatagccgtctgtctgtatggctccctgataatccttgaagagctgcaggaccaccttggctccccgggaaccttcattataggcgaagaacaccagactgttgaccatgctccgtaccagccacaggtaaccttttaccgtccggtgcttctcgttgtcgatgatgggaaccgtcgtttcatcggactggatgtaatcggtggacaggacgagttccctcaaccggtagtaggctggccgcatcaggtcggccacatcgtggaaccagacttcgatcgtggaagggggtatgctgactcccaaccgtttgaacatctgtacctgacggtagaaagggagatggtccacatacttcccgaccatcaggtcggtcagcagcgatgcactggcatagctcttggcaatgggttcattctgtacgggcgctgtaacgatttccttcgtctccttgcgcatgcctttatgccggatggtcacccggacgtacagttcggcaggctggagttccaggtgttcggacgtttcggcatcctcgaacaggatccattcgtcttcatgccccagatagccgtcaggatagatgtgctcttccacgcggcggaggttgtccggcagtttctgacggaccggaacccgtttttcatgttccttgaccgtcaccttcctgtattcattcacctcctcgacagccttgcggaccgtctcttcctcttccggggtcatttccagcaggtcaaagtccagtttgagctggttggggtcatcggggatacgccgcttctcggacatggcaccccacatcttgcgctccagataaagaagtttctgttcaagttgtgctatccggctttccttggactccaaagcccggtcgcgctcctggatggccttctccttttcagccagtctggcttcgtagtcggcctgcatccttttgacgtccgagaattccttcagctgccgttccgctttcaccgcccgccggaactcggcatcacggtcgctgagcagctgctcgatgagggctttctggttggaggtttctgacatggttttctgttcttttcttacactgcaaagatacgaaaatcagaccattttacctcattttcagaccataaaaaacgacttggaacactactttttcttgggctcccatcgactgcaccgatgaacttccgaaggggatatcccttgtacgatcatcatcaggtcagcccattttataccctttgaagtggcagggtcatcggtgtcaatatcggggagtttgaaggctccccgttcaagtttcatgttgtagataaccagaccaccgtactcggcatggagaatcttcaacccggtcaatgatttgttgataaagatataggcatcaccgtcctgaacgttcatgcccatgaggttggtcacaatgccgctcagcgaatagaagcttttgcgcatgtccgtaggatacgggtacaggaaaaatcggtttgaatcattgaggttgaacatgggctaccgacataagaggattaacgaacggagcgcttccagagacaattcactctggatgcgcaagacgacaccattgggatagaccacttcacagggtacatgatccgttgcttctttagcggagccggtgacagacatgcccagcttgccgttttggtcaaacatgttcaccggaacaaaaccgcccgcctgcggcagcatggcttctgtaagtttcttacgccaataataaaacttgctttcttcaaagccggtgttgtgacaatagtcacgaatggaaagtcccgttgacttccattcttcatgaatctttttaaattcttctaatgtcaagttcttcattgtttcacgttttaaattcacgcaaaactaagaagaactttcagagggggaaatacggggtttgctgaatgcttactatgaagctgatagattaaaattacataagcataaggctgctgaaaatatagcactattagctacctgtaaagcacaggaaattaacccaagggaatatctgaatgatgtcatagccaaacttccatattatctggaaaaggactccgggaaaaatgttcgtgaacttcttccggatgtttggaagttagagaaatccaacacgaatccaattggagtttaaatatttatgtgtaagcattcagcaaaccccgtatttccccctctgaaagttcttcttagttttgcgtgaatttaaaacgtgaaacaatgaagaacttgacattagaagaatttaaaaagattcatgaagaatggaagtcaacgggactttccattcgtgactattgtcacaacaccggctttgaagaaagcaagttttattattggcgtaagaaacttacagaagccatgctgccgcaggcgggcggttttgttccggtgaacatgtttgaccaaaacggcaagctgggcatgtctgtcaccggctccgctaaagaagcaacggatcatgtaccctgtgaagtggtctatcccaatggtgtcgtcttgcgcatccagagtgaattgtctctggaagcgctccgttcgttaatcctcttatgtcggtagcccatgttcaacctcaatgattcaaaccgatttttcctgtacccgtatcctacggacatgcgcaaaagcttctattcgctgagcggcattgtgaccaacctcatgggcatgaacgttcaggacggtgatgcctatatctttatcaacaaatcattgaccgggttgaagattctccatgccgagtacggtggtctggttatctacaacatgaaacttgaacggggagccttcaaactccccgatattgacaccgatgaccctgccacttcaaagggtataaaatgggctgacctgatgatgatcgtacaagggatatccccttcggaagttcatcggtgcagtcgatgggagcccaagaaaaagtagtgttccaagtcgttttttatggtctgaaaatgaggtaaaatggtctgattttcgtatctttgcagtgtaagaaaagaacagaaaaccatgtcagaaacctccaaccagaaagccctcatcgagcagctgctcagcgaccgtgatgccgagttccggcgggcggtgaaagcggaacggcagctgaaggaattctcggacgtcaaaaggatgcaggccgactacgaagccagactggctgaaaaggagaaggccatccaggagcgcgaccgggctttggagtccaaggaaagccggatagcacaacttgaacagaaacttctttatctggagcgcaagatgtggggtgccatgtccgagaagcggcgtatccccgatgaccccaaccagctcaaactggactttgacctgctggaaatgaccccggaagaggaagagacggtccgcaaggctgtcgaggaggtgaatgaatacaggaaggtgacggtcaaggaacatgaaaaacgggttccggtccgtcagaaactgccggacaacctccgccgcgtggaagagcacatctatcctgacggctatctggggcatgaagacgaatggatcctgttcgaggatgccgaaacgtccgaacacctggaactccagcctgccgaactgtacgtccgggtgaccatccggcataaaggcatgcgcaaggagacgaaggaaatcgttacagcgcccgtacagaatgaacccattgccaagagctatgccagtgcatcgctgctgaccgacctgatggtcgggaagtatgtggaccatctccctttctaccgtcaggtacagatgttcaaacggttgggagtcagcatacccccttccacgatcgaagtctggttccacgatgtggccgacctgatgcggccagcctactaccggttgagggaactcgtcctgtccaccgattacatccagtccgatgaaacgacggttcccatcatcgacaacgagaagcaccggacggtaaaaggttacctgtggctggtacggagcatggtcaacagtctggtgttcttcgcctataatgaaggttcccggggagccaaggtggtcctgcagctcttcaaggattatcagggagccatacagacagacggctatgccggatacaacatcctggaaaaacaggaaggcataacgacattgggatgctgggtacatacccgaaggtactttgacagggctttaacccatgacaaggcgagggcggaatacgctttggcccagattggcatgctgtatgatgtggagagcatggcagacgaccagcatatggataccctccagcgcatggagctgaggaagcggcttgcctatcccatcatacgcgcttttgagaagtggtgtatctgtgagcagggaaatgtgcttccgaagagtcccataggaaaagccatcggctacttcctgaacaactctcgccggttggtgaggtatacgatggacggaaggtatctcccagacacgaacctgatagagaacagtgtgcgacccgtagctgtcggacgcaagaattatctcttctgcggcaatcacgacgctgctgaagatgctgccgtcatctactccctgatgggatgctgcaaggcagcagacgtggacttcaagcagtggatgaattattttctgaaccatgtccatgaatatgacagtgactactccaaggatctggtaaatctgttgccacactctttaaagaaacaaggtatcatttaagaatctcgtaaaaactaagagatgtctcgtaaaaatagggactttttaagagaaaagtcggaatttttaagaggcatctctttatgtttatagaccttgcaagacggggtttactaattgcttacatttatgttgaagaataaaaaaactcgatattagcttttgactaaagttgatatcgagttttctatttataaaaaatacaatgtgtgctttatcggatgcttacgttacaatactgattcacgtttttaaatttgcacaaaacgatgaaacactttcaaaagataaaatacggggtagctgaatacttaccttacaacttatcaaacaaacggatttttatatatgcccaataattgcttggtaaagtaatagaaaaattgcatatcatccacaaagtaacgcttaaagagacgcctaggttctttcatacagcgatacaaccattccatacctatagtttgccaaatcttgggtgcacgcttcaatgtgccagcctcaaaatcaatcgtcgcacctaatgccatgaagacctttacgccaggtattttttcgcgatactttataatccacttttcttgtttaggagcacccgcacctaccagcaacacattcgccccgctttcattcactatacgcaccaattcttcacactctttttcatttttctcaaaaccaaacgaaggtgaatgcgcacctaccacaatctttcgacccactttctcattgatatgctccatcgctttggcggctattccctcttttgctcccagcaagaaaattctgcaatccgcatcattcttgtggtacatataataagaagtaaagaaactcgaaccaggaatagcttcctttatcgatttcctcaataacttaccgaacaagtaaagtatcttactatcacataccacccactccgacttctgatacacatcataaaactccttatccttttgaagctttatcaggtgatcaaggttaggagtcacaagaacaccttccttcaaattctccaaaagttcctgacgggtaatattttgaatattaatatttaaaactcttactgtttccattcaattacttttattatattttcactactgtcccgtaaaagtggataaatagttctttgaaattattgaaatatagtcaattacacggttttttgaaatgaaacggacttgattttgcaactttgcagtctaatacaaatggctgctatgttccaagacaaatacgtattctctcaattaaccgcttttctgaacaggactcagttcaacaactatgttcgcaagtatgatggcaacagatatgtgaaacatttcacttgctggaatcagatgctcgcgatgatgtttggacaactgagtaaccgtgagagcctgcgagacttagtcgttgctttcgaggcgcatagggccaagcaatatcatcttggtttaggtcgtgaaccgatagccaagacaactcttgcgacagcgaaccagaaccgtgattacagaatcttcgaagactttgcattctatatgatgaaggaagcctgcgagaagcggacgaccaacatccttgacatttccggaaagaaatatgcgtttgattcaacaacgattccgttgtgtcttgcaacattcccatgggcaaagttccgaagcaagaaaggaggggtgaaagctcatgtcttatacgacattgaagcacaagttcctgccttctatactgtaactactgcatcaaagcatgattccacagcaatgtcttcaatccattatgaaccaaatgcttattatatattcgacagggcttatgactcctttaaagaactctataggatacatcttacagactctttctttgttgtcagagccaagacgaacttaaagtataagacagtcagatggaagcgaagaatgccaaagaacataatgacagatgcggaagtgaaactgaccggatatctctccgagaaaaaatatcctgagtcattcagactcgtccgatattacgacgaagaggatgaccgtgagttcacttttttgacgaatgcaaaacaactttctgcactggatgtcgccgatctttataagaaaagatggttaatcgagctgttcttcaaatggctcaagcagcatctcaagataaagaaattctggggcacaacagagaacgctgttcgcatacaaatcagtgtggctattatcacgtactgtcttgtggctattgtccaacatgatatgaagttgaaacgttcaacctatgaagttttacaaattctcagcatatcattgactgacaaaacccacttgcgtgacctgttcgacaagactaatttcaatgatgtcaaagatctaaatgatcccctgattccggggctttttgattaattgtttaactcgtcccattttaacgggacactaatgttatattttaataaatctattcaccaatatttgatatcctattgccactaagtacgaaataaacatcaaaattacccaatcaacaaagaatggcaatacccctctcgcaaacctgaagtaaatcgtgaacacaagtatatgtacaagataccactcgtatgaaatcttattggtatattcaaagaatttattcaaccatttaactccaacttgataaaagataagtgccatagacatatatccaatcaacgaaggtatgtcattataagatttccaaatacctcccacaaaaccagcaatgccagtcaatcctaatcctataatcattgttaccaaaagaacactaactttcggtacttttatattctccgaattctcaaaataaaccttcgccaaccacattcctaaaacaaattcccacagatattgcaagaagaaactattccaaattctctcttctgccaaccctgttaatgccgtaaatgtagcccaacacaaactgataagcaacgaaatccccttttttttctctaacattttaacaatcaatggatagaacaaataaaactggataatggtagaaacaaaccacatctgtccgccaaaggcacattctaaagatggaacaaacatcttgaagagaaacacagaacccaataaaggcatcaatacatcttgtccgcaaactaaaccaaaatacaatgcacttatcagcactacaagcacataagggatataaactttcgtaaatctccgcttcaaaaatctcccatacttcataggattatataatgacgacaaatacaaaccaaaaccgctgcataaaataaacacatgaacaccagcccctcccattgaggacgctttcataaggaatcccggtaaaggatagcactgcaccaaatgcatcaatactattgtaaaaatagagaaaccacgtagaaaatccacgatgtccaacctctttctttttatttgtccttccattcaattactttcattaataaacgaatcatatattctcgctaaatctctaaaaaccttttccgggaaaaaatcttgtgctatttgataagcttgttccccttgttttctaatggaatcaagattttcaatataatatttaatagcctctgctatgttctgagtatctcctggtttgacaagcattccattttgtccgttcttaaccacttccggaataccaccaacaggagtggatataacaggatgagcgtaagccatagcttcaagaatagctataggtaatccttcattgtaggatggtaaaatataaacatcttcccaattcaaacagtcaatttttttttgaccagcaatccatccctcataagacacaaaatcccctaatccatgttcacgaatataaccttttatatcaccatccacttcatttccccccattctaagtagtaacttatcttgaaaataatccctattatcactaatagcttttaacaaatcaaaagctcctttacggttactgatttcacccatatacataagatgtaatctttgatccatctttataactttatttaaaatgggaggtgatacaatattatttagaacctgtattttatcattaggaataccaatagatataaaaaaatctttccacgaatttgataaaacaattaagcaatcacataaatttatagtatctactatatcttgtttattgttattattattataaaactcaacgaaatctgctgcatgctcatgcaaaataacctttttcccagctttttttgcaagctttataaaaatcttacaacgataaaaagaagcattagctgctccatgaatatggacaatttttaaatgtctattccaaatacaactccacaaagtacgcacaatagcctgaaaggcatacaaagattttatcaatttattccccaatttccacgtaggaataaaatgcatattttcaatatacttattatatgagaccaaaacagcagtcattccacctttggttttcatagatacacctaaaaataaaacatgtctagaagtatcttgttttaaaatataatccatcagatacgttttttaattactcttgcaggattacctcctacaatgctataaggttcaacatcttttgtaacaatagccccagctgctaaaatactacctttaccaatttttcgaccaggagtcataatcactctagttcctatccaacaatcgtcttcaataacagtttgcgggtcttcttttggatacccttgaaaacacataggtgttgatatatttgaaaatatatgattattttttactatatacacttcaggagccatcatcacatatttacctattatcgtatttttaggtattacacatttagcaccaataccactataatctcctatttcaatatctctaccagatccaaaataggctaatctattaattgttgtaattttaccacattttttaaatatgtgcttaaccagtcctatacgaatagcattacttatttttccaacaattggaagatatgaatccggcaaatattgcgcaaatccataataaaataataaacaaatgattctcatagctcaaaattttgttttatgtattttgacaatagacttattttttaaaaacgtcctaaaatctttcgcttcttgtgaattctttttgaatgggaaaaaaaatccatttttactagaccatgaaccataaatctctacataagccaaattaacaccaatagcagttagacaaggctctaaacacttcgtaaaccaattaggtatctttaatgcttgatttccagtttctgttaatgctgcaacttttttattttgcttagcaaaatctgatagcagttttagctgttttttagtcttttccactgtggattcctttatcccataattatcaaagcccacaatatcaacataatcattacctggataccgactcatataattatcagtaagatccatactatcccaatttttatccggagaataagctatcatcacattatcacactgctccgtaatacgacctaccgtataacgaaacaatgctttatactcttgatcactacagcacttgtttccccaccaaaaccaattttctgatgcctcatgaaataacctaaccacaataggaatactattaccttttacatcctttaacaacttcaacatttcaataaactcatctaattgttcatcaaatttatttttcacagtctgccttgcatttaatttaatcttgccacctaatatttcagcaacaacattaggatgtttcaatgacatatatctataatcagcaacatacccttcttgctcctcataccaccaaggattagcaatatggcaactaagcaccacaagccctcctactatattagtataatgaataacataattaatcagagcattcttatgataatctctatccttcttagcaattttatttatagcatgagaaaaaaaatcagtttctgtcatcgaaggatatttccctgttatacgcttaaaatcactattaaatatattactagtccttgatgaaagagacgaataaaaatcattccttatcttcaaaataccattctcatccaatgcttctcttccatcattgtataaaccaataaaaaatgtattatttatggaattatggcataatttatgccacatacttacagtctgagtattccatttataagaatgcattgattgagctattgcataatagacagaattacttataaataataatattaaataatatttcatatgtattttacttatgttcaagtataggtattagataatcatctattatatacttccattgatacttaataagagtatttcttattatttcactcttatatttttctttatttttcaacacattttccaacgcatctttaaatgagtcactattatcttgatgaagaattccattactatcattaataatttctttatttgatgcagttgcagttcctacacagaatattcctgataagatatattcaaatgttttagttggtggctgaaattcataataatcagtaataggaacataagaaatccctatattatgattttcaaaaaatggcataagtgatgaatacggaatcctaccatgaagtgttatatattgctccatattatgaagttgaatatattcattcatttcttccatttcattattaataccatcacctactatatcataatgagattttacttctggatgtgcttttataaaagctatgtatcctttaaccgtatcaattatatttctattatttaaagttcctacatatagaagattaagttcctcaaaagatttattacttttggatataatatctgcgcccaacggaagaataaaagaagatttatgattttcttgcataatttgcttttgaattccactcgttataaaagaagaagaattaaaatacttaagatcttgctttaactgattattagaaaaaattcttgctttctctgttatttcaacagataaggtacgaacatctatatgcattttcttccaaaaaaaaacacgtttcaaaatcgagcattttggaaagtttgctataaaaataaagcctctaaaaaaaagtatattcaacaagctataagccaaaaacaacattcctctaaaagcaaaatttccaatacgtggcacatatgtaacctttacgtcaggaatatcaattttagggttacccatatcaaaacataagtaatgcacctgatagcgattatgtaaaatttcacaatattttaaataatcagttattaatcccaactgacttctatctataaataatactttcttcattatattatcttcattatttataatcaacattattacatatcccaaataaacttatacatacctagtggcctcatgaaaagatacttcaaataatcatatccaaaaaacaataaagttaaaaataaaagattagctacaactttgtatttaaacaaagtaaatacttcctttttataatataaaacataagctaaaggaaatgcccaataccaatacataacatcccccattcttctcaaaatttcaagagaataaaagcattgagaaaagatagctcctatgacgaacaaattataaaaaaataatatttgcttattctttctaacttggagtatacgataccccaaataaatcaaagaacactctccaagagtttgtataatttttacaactgaatttctgtcatagatagcattttttgcatcattatcaaaccaaacatctgcattatctgtatatgtagaaaatttatcattatgttctcccaaaaaagataatattccatccaaataactaaaatcaaaatgattttgcaaataataagaagctaacaaatacataggaatagtcaattttggcggaaatggtatttttataaaaaaatataatccaagatctattatacaagtaatggcattggctgaatgtatactataggccaaataaaaacatacaaacatacagatataccgtttatatataggcatctcctccttaaacaagaaaagcataaataagaaaacgaaagtatatccaaaagattgacgtatcatatactctgaaaagactgtaaaagatatcaaaaacaaaggtaatacccatgcagcatatcgcttaacagatctcaagaaaaacatggctcccaatataaaagcacccgaataccaaataaaaatccaatgcggtcctgttcccaaatctttaaggaaatgattaaatgcagtaaacagtacttgcttatcttctaaatcataaagataaacttccatataatgaacataatcattacctctattaagccgcaatcctaatacaatagtaaaaactattgctggccaaaacgcataaatccaataatgagacttatctttacttatacctttcccagctataatgaatgttatcagcataagtaaatttaaaaatatataaataaagtctgtcgttatcattgtctatttattgaggtatttgactatcattaatacactgaaaattatttcttttgttgtttacaccattctataaactcatcaaatgaattaaatcttcctccaaatgtactatcagatttataatatatttcctcttcagtcaattcattaggtaaaggataatgcctttttcgttcatagaaagcattaaccaattcagcagcttccataggagctttcttcaatcgcttttgataatactcttctaaagaacacactacacgacatggatttcctaaagcaacactattagacggaatagattttgatacaatacttccagccccaataatacaattatcacctatagtaaccccttttagtaccatacaatctgcaccaaaatatatattacttcctattgtcaccttaccggaagaattaatcatctgattatatttacctataaatacacgagccccccaatcatgagtgtatattttgaaattcacattcatatctacattattacctatagatattaaatagggtctcgtcatatcaataattgtagtctttggtgctctaaagatacacccactgcctatttcaaccccttgtttttttagaaattcaatatatctaacagatgaactagtataatataccttttttaaaaaagacattattttattatttttcatataacagtttatcatagtaaattatgttttatccaatcaagagaattacttcttaaatcttctaaactaacctgttcctgatccttatcatagaacggattagcatacgcaatttcttcatttaccctcaatcgacattgctctaatccaacttgcgacaacaaactactttgtctgtcatcaccattactcggagtaatagaaagcaaaggaacaccataatttaatgcgaaagctgtgccatgaaatgaagaagtaacaactaaagaagcgttggcaaaataatccaaaaattccggaatcgtagattcggttgcatcaataatacctagttcttgcacgcgagcatcttttccatcatatccttctaatgcaataattttgcattgcattttttctttataatatttcaatacatcatatacatacggacaaggttcaaaagcatatctcaataaatataataaaatatatttattagactttgcttttgaagtacgaagggaatcccattgagtagcactcaataacaaagttggatctaaaaccaatttagagttcttgaagcccaattgagataaaatatctaatccataagattctctaactgacaaagatgaaaaattagacaactcccgcttaaatattccaacatatttttcatctaattctttacaagcaaaactagaagctatcgagatctttttcttgctagcatctgcaaattgcaataaaaagaccggatcacaattggtatatttagtattccatatttggtcacttcctattatataaacatcataaaacgctccttcagctacctgtatatccttaaatttactataatacttagtcaaatgaagattatttcgggtaaattttttaagaatattagccttgcgatgattcgatttaatacctaaccacagtcctattttattttttagactaattccctttacaccatgctccttagcccattctccttgattatgatcataattaagaactgaacagtcatagcctaattgttctataacgcattgcgtagcatatgtttgaagcacacttccaaaattaggaacagtaaatatagttactaacagtacacgctgtttcatattattttattatcttattgattttaccaactactcgacttataaacactaactgcttcatagaaataatagaagacttagctgcttgaatcactacagaccaccctaacggatatgtgataggagcttttatctgcccttctgcaacttgttcaaaaggatattcattcaactcacaattaatattcatcaacactttttttcccctttcggtaaatgcgacacaagctgttacacccttatcttctgtagcatatgtgtttccccacatatcaccaatacggacatcagccgaagaacaatcatatttaaacttacaatgtttataacaagcttttcccaagcaattattacctaaaaacatgttataaaatgcatctccctgagtccacctggaattcacaaatccttttttttcctttattaacatattgtaagaatcatgccaatcaacaacttccccctgttgtttgctaccatccaataccatagcccaagagtcatgccacccatttaatttattacgccaggaaacaaattcaagaagacctaaaaccttttgctgctcttttacatacttgtgccaaacatgcgaactaggaacaccatggcaaaaaaaatccatcagaataaagtgttcttcacatttcatccgacaaatatatctgcgcaaagaatctatttgacaaggagtaccagttattaaaaatttatcctttctatttatgcccttaaatccagataaagtataactttgaatatacttactacccatagaaaatataaaatcttcgacagtctcagccacataatgctccgcacgtctgttttccaaactatacttaactccaatcgctttataaccttgttcgattaaatatcttccaatctcaaagcctactcccccactggcacttaccctacgcacagaaacctctttactccatgcaccataagatactttaggtttttcttttaaagctgtttctgtatgagtataagagcatacatcaagacacaatccacaatttacacatttggattcatctgtaatataaggttcataaaaaccattagaattaagatgaatgtcaataatctttttaggacaagccattgcgcaaacagcgcaaccataacatgaatgtatgtgagaaatattattcattaatataatttttaatcatttttttcaataaaaatactactgttttctctttagaaatttagttcgtattgatcgcataaccatttctttttcacttttacatgtcccacatacatatattatatagcacatcataggcacaaataatataaataaaagcaatctgtaatatcctcctgtttctgcatagatatataaggctataggtaaagataatgctgttacaaatacaattggaaatatcacctccctaacatagttacgaattgagaattgcaaataatatttaacaaataaaacacggactccgactgtaaaacctgtaataacaatttgtataattaagactacacttggagcatatccatacattaaaaataaataactaacaggtaaattcaataataaacaaatacctgtaactatttgaaatcttttaatttttccacctgcttgcatggccgcccataatggtcccgttaacgagtcaaccaaacaatatacagaagttaatatcgcaaaaatagccgtatgctcagggggattttttaaccaaagttctaatattaaatcaatattgaaaattataggaaatacaattatcaacatcaaaaaataggaatatttagatatacggtataccaatattttaaaatattcataatcacccaaagcataagattttaccatttgaggattaacagccaactgcaaattcccaataaaaggaacaagagcattacgtatctgattggtaatacctaatacagcattgatcgatactccccaaaaaagatttaaaattatattagttccttgcttgtagccaatatctgccaatccaccaaataaattccatacagaaaagctcgttaattccacaaaaagttttttatttgttttcaaataaaatttattagccaaaagaaaccgctgacaataataccaataagcaatatcaataacaatagcaactaacaacaataaaaatgaataaataaccaatttatcacctggtgttattgccaacgcccatacaaccgctaattttaagaatgtttccacaatactaacataagcaaaaaaagacatacgttcattggctatgatactggcattataagggatacgaataatatttacacaagtggtaagaattgctaactgataaacaaaattggtagcactcattctatctgcaggaatttccaacttagcatttataagccaaagcccaattgtttctgcagcaagaaatataaaaaaaatcaaaaagaaatgagaaagaagtgaagtagaaaatacagcttgaatgtacttttcatcctttttcccaatcgctatacttaaatagcgttgtgtagctgtaatcatggcattactcaaaaaagaaaataaaataactacaccggctaccaaattataaattccaaaatcttctacccctaattcattcagaataattctactggtatataaagaaactaccatgataagaatcattctaaaatagagtaacagcgtatttttagctattcgtttactatttgactcttgattagacatactctaaatttattaataacaaaactattaaaacaactaatcagcgaaacagcacaacccattctattgcctatgacaataatcactaatagttcttcttttatttctttattataaaataatattattctaaaatcaagttctgcaaatagcaaactaaatcagcacaacaatacttgtaatctacaaaaaacaaaagactccagaaaaataaatcctagagtctttataactgtgccttgtacaccctcagggattcgaaccctggacccactgattaagagtcagttgctctaccaactgagctaagagtgcgtttatttgcttatgtagtggatacgagaatcgaactcgtattgcatgcgtgagaggcatgtgtcctaaccgttagacgaatccaccaagtttttttttagaaaagcatcggctctttcagaccgatgctttcagttccttgcggaagctgggggattcgaacccccggtacggttacccgtacgtcagtttagcaaactggtggtttcagccactcacccaaacttccttagtaaccaacatttgttctcaaatgcggtgcaaatgtatggcaaacttttggactatgcaaatctttcccgcatatttttttcagtatttttgcagggaaatagataacacgctaacactcaaaacacaataccctgtttaatttttcttcaaaaagtattttctcaagctccttttagagtatccccgttcagtctccctatctttaccggtgcaccccccgtttacttcccataaagaaaaacggtctttcgtccccaagcctatcttataaaactcttgcttgcccatttcatgctgtaccaacggcgcacaaaaatagccccgcggatattctcgtccagcaaaaacgctacccacatgccgcaaataccccagcccaacggaatgccaaacagatagccaagccctacggcaacactccacatcaccaccagccccacatagaacggataattcacatcgcccgccgcacgcagcgcattcgtcgcgaagatattgacaggacgccctatctccagcacaatatcaataaccagaatggtaacccccatctttataatctcggcattggacgtcagccagccgaaaataacatgcccgaaaagagcaagaatacaagacagaatcacggttatcatcaccgacttcttcattacatatttccccatcaggaaagccgcccgcggcttcttctcccctatcagatgcccgatacatatcgccccgccctgtgccatggaaatgctgaacagataagcaaacatgatgatattgacacaataagtacgcgtggcaagcgcttccactcccagcatattgatgaaataagtaatcaccacctgcgacgaactgtaagaaagctgctcgccggcagaaggcaaccccaccttcatcaggttcttcaactccacccaagggaacggacggaagtaagccggcgggaaacggtggatatgcttgcgaaacaagattacaaacaggatcaccatagacacccctctactgaaagccgtagagatagccgccccctccactcccaattccggaaagccgaaacgcccgaaaatcaaggaatagttgcctattatattcagcacattcaccaccaccgtcaccagcatcggatacaccgccttgttggcgctgcgcaacgaagcggaaagagtaagcgacaatgcctggaaaaaggcgaacgcccctacaatacgcatatagtccatgccgtcctgcatcagttcgggccccagccccatcagccgcagaataggctccgcacacccgaacaacagcatgctgatacctacacccaccacgaagttcaccagaatggatacccccaccacctgcaccacctgtttatgcagccgtgcgccgagatactgcgaacacagcacggaagtaccgagattaatcacctcaaacaccaggaaagtcagcatgataatctgattgaccacccctacggcagccacactgttgtccgaatggcggctcagcataacggtatccaccgcgccaagcatcataattaataatgtctctatgaaaatgggagccgccagtctggcaagccgtttcttcagattctccttctgtatcattgttgtagaagcgctatgataaaaatcgcgcaaagatacggaaaggaaagggagaacaacttgacacatatcaaatattttttgctacctttgccacgctaaatgacacccaaacctgcataaccgttatggacacattactcaaagaaacagtgaatgcaaccgtcaactcccgctatcccggcatggcgcccgaaggcagacggcaattggaagaaatcctggtccgcaaagaagtggaaaaaggcgaacttctactgaaagagggacaggtaagccataatatcgtactcgtcggcaaaggcatgctgcgccagttctattacaaaaacgggaaagacgtcaccgaacatttctcttatgaaggatgcatcgtcatctgcattgaaagcacgctgaagaaagagcccacccacctcatgattgaagcgctcgaagacagcgtggtctacctgctgccttatgacaagctgatgcttcttaccgaaatatcgtgggaaatcaatatgttctatcgcaagatactcgaatactcccttattgtttcacaaatcaaagccgattcctggcggttcgagacagcacgcgaacgctacagccagctgatggagcaacagccggaagtcatcaagcgcgcccctctgtcgcacatcgcctcctacctgctgatgactccagagaccttaagccgggtacgttcgggcatactctgatttttacgggaatgcccggaccggtcataatctgaatccatatagaatatttaccctttctatatacggagtccctttgaattttcttcaaaaagaacttcccaaagaagctgaacaaaatttaaacggactcttaaacccgtcttatctcaaatctttttttgagatagcttgtttatcaagctcgttatccaacttaaaattcagattatgactaccatatacacttttgcgcaaagcgcaatcgaagaagccagaagcgccggccgctacggcacagccaacctgtattccggcgccatcaacagtttccggaattttaccggagacatccctcttaccttcaaggaagtgacggcgggaatgataaaacgatacgaagaaagcctgttgcagaaaggccggcgccacaataccatctccgcctatatgcgcatgctgcgttccatattcaaccaggcataccagcaaggcattcccgatacgatacctgccgacgagctattccgcttcgtattcaccggctacgagcctaccgccaaacgtgccatttcccccgcccttatacggcgtctctcgcaactgaatctggaacactccccccacctgcgcttcagccgtgatttattcctgctcagtttctacctgagaggcattccgtttgtcgacctggtccatctccgcaagacggacatgaagcacaacaccatttactactaccgccgcaagacccgccagcagctatcggtctacctcgaaccatacgccgccgagattctgcgacgctatgccgacaagcattccccctctccctaccttctgcccatactctcgttggtcggtccggaaggctaccggcagtacaaaagcgccctgcgcctttacaaccagcacctgcaccggctatccaagatgctgcgtctgagtgtgccgctcacctcctacgtggcacgccacagttgggccaccaccgccaaagaagaaggagtagccattgccatgataagcgaaggtctggggcacagttccgaaaaggtgacacacgtatacctcgcatcttttaacaataatgcaatgagtaaagccaaccggaaggttatttccaccattcatgccaaaaagaaaaagggaaaaagagggaaatagaataaaaataacatgtaaattaatattacctgctatataaaattgtttcatagatagttcattctcttacttacaaggtaagagaatgaataaaatactataaaaaagcttttataataacatgaaaagcgcttttcctattgtattccttatgcttccataaaggcgtagaagcgaaatgtcatttttgaaactttgttaaacaaaacaaacctttctaatcaaacatgtaaatatttaatactttaaaaatatgttttatgcctttttatgagtagttatgataggtatttgagtttaaaaaataaatatttttttgcttgtaatgataatatttttcatacctttgcaatcggaataatggttctcttaccttgtaagtaagggaataggtcatctcttaccttgtaagtaagagagcccataattaatcataacaaataaaacaggaaaatcaattattttatttacaaaaattcaatgattgacaagacattacgaagattatgaaacaaattttgcgtttcaacaaaattatcaagagtatcatcatcacaggtgatttatgcattcttaatgcactctttataaccttgtactatgtattggacacagatacccagcgtatccttctctccgattcactgccgcaattgttggtattgttgaatttggtctatctcttatgtaactattccaaaggagtcgtgcttcaccgccgcatcgtacgtgcggatcatatcgtaatgcgtgccgtacgcaatacattctgccatgcggtagtattcatcagtcttatcacgctggtgcatttcggcagcttgtccacacgcttcctcattatattctatacgacattccttgtactgcttgtattatacagactcatattcaggcatttcgtcaagatataccgccgcaagggaggcaaccgacgtactgtcgcgctcgtgggcgacggttccaatatggtcgaactttatgaagagatgaccgccgaccctacttccggcttcaaggtagtaggctattttgccgagcatccttccgacaattatccgaaagaatgctgctatctgggcactccccaagaagtaatcccttatcttaagaaaagtaaggccgaacagttatattgtggtcttgcttcctcgcatagcaaagagattctgcccatcatcagctactgcgaaaacaacctgattcatttttacagcgtgcccaacgtacgcaactacctgaaacggcgcatgcaccttgaactgataggaagcgtacctgtgctggacattcgtcaggaaccgttggcgcaacccgaaaaccggttggcaaaacgtctgttcgacatcgtgttctcactattgttcctatgcacaatctttcctatcatcttcatcataataggattggctatcaagataacctcgcccggacctatcttcttcaagcagaagcgtagcggcgaggagaacaaggagttctggtgctataagttccgttccatgcgtgtcaacaaggacagcgataaggtgcaggctactttaaacgacccgcgcaaaacccgtctgggcaatttcatgcgcaaaacaagcatcgacgaactgccgcagttcatcaacgttctgttgggcgacatgtccgtagtaggtccccgcccgcacatgctgaaacataccgaagaatactccaagctgattgataagtatatggtacgccaccttgtcaagcccggcatcaccggttgggcgcaagtcaccggcttccgcggagagaccaaggaactctggcagatggaaggacgcgtggagcgcgacatctggtatctggaacactggacatttgtgctcgacctgtacattatctacaagaccgtgaagaatgcgataaaaggagaaaaagaggcctactaaaacgagttgaaagctgagagttaaaatcaaaacacatgagaaaaagaaaaagtctgattattttattgttgttgccgctattgctggcagggtgtcaaagctataaaaaagttccttatcttcaggatacactgcaagaggttgccgccggagataccggcatggctgatatgccgttgtatgatgcacgcatcatgccgaaagacctgcttactatcgtagtgagttgccccgaagaaccggaattggcgataccgttcaatttgacagtgacgagtccgttaagcaaagagaacagctacctgacaaaccagcctgtactgcaacagtatctggtagacaataaaggtaacatagacttccctatcatcggcaatatccacataggcggcctgacaaaaagcgaagcggaagaattgataaaaacaaaactccaacctcaattccgtgaaatgcccattgttaccgtacgcatggtcaactacaaaatctccgttatcggtgaagttgcccatcccggtacatttaccatttccaatgaaaaggtaaacattttcgaggcacttgccatggcaggagatatgaccgtatatggtatccgcgacaaagtaaaactgattcgggaagacaatcagggaaagcgcgaaatcattaccttaaacctgaacgacagtgatatcatcaattcgccctattactatttgcaacagaatgacatactttatgtcactcccaataaaacgatttccaagaactccggtatcagtaatagtaccactatatggattagtatagtaggaacactcgtttcattagcaagtttaattactacaatcatcaaataacgacaactaaatgtcatcattatagtttatttaaattctatgaaagaagaactttacaacgatacattagaagaaaaagaagagcagccggatgttaaagctatcttattcaaatacatcatccgctggccttggttcgttgcatcagtcattatctgcatggcatgtgcatggatttacctgaaacaaagcacccctgcttacaatatcaatgcatctatccttatcaaggatgagaagaaaggcggcatgttaggaagcgaattttcaggactcgaagacctcgggctgctcaatccgtcaaagaatatcgacaacgaaatagaaattctacaaagcaagtccttgataaaggatgtgattaatgaactgggactctatatcgactacacaacttccacaggtttcaaaaccagagacctttacggcgcatcacctatacttgcccattattctcccaaagatgccgaactgctcgacgcacccatgttgctcactgtcgactatcagaaaagcggacagatagaagttaacgtaactaccggcaagggaagcgacgaggaaaagactttcagtaaaagttttaccgaattgccggcagtattatcaggtgaaaaaggtaccataacttttatgcccaattcacaagtccccattacagaggacggaaagcttgaaatcactatccaacatccgcttgctgtggcaaaaagctaccgcaaggcacttgctattgggcctaccagcaaaactacttctgtagctactatatcaatcagtaatacgaataaaaaacgtggtgaggactttatcaataagttggtagaaatgtacaatcgtgatgccaatgatgacaaaaatgaagtagctcaaaataccgcccgctttatcgatgaacgtattgccattatcaatcaggaattaggaaccaccgagcaagaattggaaagctttaagcgtgaatccggactgactgaccttaatagtgatgcacaacttgccattgctgaaaaatcagcatacgaaaaactctgtgtagaaaatggtacacaattaaatttggtacaatatttgtcagattatctcaaaaaaccggaaaatgccaatactactcttccggtcaatgtgggtttaaatgacaaatcacttacagagcagatatctcaatacaatgcactgattctggaacgcaaccgtctgcgtcgcgcttcttccgactccaaccctgtagtccgccggctcgacagcaacattgacgatatgcatgccagccttttgactaccatcaacagcgtatacaagggattgctcatcaccaaagccgacctcgaccgccaggcaggcaaatatgccggtcaaatcagcaatgctccagcacaggaacgtcgctttgtcagcatccagcgccagcaggaaatcaaggcggggctttacctgatgctgttgcagaaacgcgaagaaaacaatatcgcgcttgccgccaccgccaacaacgctaaaatcatagatgacgcattggcggatgatgtacccatatcgcctaataaaaagataatttacctggcagccctggtactcggtttcggcattccggttgccgtcatctatacactgagcctgctcagctaccgcatcgaaggacattctgatgtcgaaagacttacgcgtgttcctgttatcggcgatgttcccttgaacgactccaacgaaaagtacgccatcgccgtccgcgaaaacgacaacgacatcatggcagagactttccgcagcctgcgcaccaacctgcttttcatgttgggcgaccctgacaagaaagtaattctcgttacctctaccatgagcggtgaaggaaagacattcatcgcatctaacctggctgtcagcctggcattattgggtaagaaagtcatcatcgtggggctcgacatccgcaagccgggattgaacaaggtcttccgcatacaccacaaggaaaagggaatcaccggtttcctctccgctccccaaagtaccgatttgcgttccatgatactgccttccgaagtatcgaacaatcttcatgtactgcccggcggagccatcccgcccaaccccacggagctgttggcgcgcaaatccctggacgatgccatcgaactgttgaaaaaagactacgactatgtcgtgctcgacaccgcccctatcggcatggtcaccgacacgcagctcatagcacgcgttgccgacatcagcgtttacgtatgccgtgccgactatacgcataagaacgactaccagctcatcaacgagctgtacgccaacaagcgtttgcccggtctgtgcactgttatcaacggactggacatgaaaaagaagaagtacggctactattacggctacggcaagtacggcaggtactacggctacggcaagaaatatggctatggctacgggtacggttatggcgatacttccgattcgaaataagatattcaccccataagcctggggaacttctacatgcaatgctgtccttgtttccgggcttattttttgtttgtttgcttgtatgctgtggcagcagagcgctgctgcccggcatactttttaacccaaccgaacgtaaaaaacaatgcagaatacgaatcacatagaaacaaaaaccaatacagcatcccgccaatggctggtggcctatgtacagtcgtgccttgagaaaaagactgcgcaacggcttgccgctatgggcatcgagtgctacctgcccgtccagagcgagatccgccagtggagcgaccgccgcaaacgggtagactgtcttgtgattcccatgatgatattcgtgcatgtcactccgcaggaacggcctctccccctgagcctgcaggcggtcagccgctatatggtactgcgcggcgaaagcactcccgctgtcatccccgacgaacagatggaccggttccgcttcatgctcgactacagccccgaagcggtggaaatgtgcagcgccccactggctcccggcgatgccgtgaaagtaataaaagggccgcttgccggactcgaaggggagcttatcactgtgaacgggaaaagtaaagttgctgtgcggctggatatgttggggtgtgcgcatgtggatgtgcctataggatttgttgagaaaaggggagggggaggaatagaaggacaaaagaacaaaaagacaaaagagatacagaagacaaaagaaatacaaaagacgaaagagacactgaaggcaaaagggatacagaagaggaggcaacaagaagaaaaggctgtacgatgattttacttatcaccctacagccttttcagcatcccgctatcagaattccttccctacatcaaagcagggacattgcttggtccactccatgggttccacttctccgttttcgttcaggtcgggactgaggtccctgtgccccactacacacgtaccgggataatcctgtaacaactttcctaccagcacactcaacgaatgtcgctgccactctgtcctcgtatctttcggatttccgtaacggtccagcccaccttcataacagatgcctatcgagtgagcattgtagccccgcgcatgcgcccctactttgcttaccggacgggtagccaggactcttccgtcacgccgtacatagaaatgataccccgttccgtcgaaccctataagcctgtgagaagcctccagcgcctgttcggtcaacgcatagttctcgcgcgtggagctacaatggattactatcaggtcaatcgctctcatctcctaaaatgtcatcgcattcgcaccaaacacacccagcacagccgaagccactgcaattaccactttcaaaatcgtatcccaaaaacctttactttttcccatactttttttttcaatttaaaaatttaaaattcatcattcaaaacaccttatccttatcccaacgggttctcttcctcaccgccggcatttccgccgccgttgccgctgccgcccgatgtcttgttgtcgtcggacaccagctcgaaattgatattgttgggtgcgcccttcgtggtggcaaccgagtcgttcaccagtctgagcgtagtggcgaccttgaaattaatccgcaccttgtcaatattcttcaccgtacaatccttgggattttccgtagccacacagtgaaacgaagtgcggaagataccgaaatcatccagacggacactgttgccgtcggtcagcttctcgcgcatgtttctcacaattgccttgcccacgtgcagcacatcctctgccgacatacctcccaaagcctctatttcttccgagatgcgtttcaaatcatacatcttcgcgtcgcgcggttttcttttcaggatataaaccaacggagacgtcttgtcgccaatcttcttgtagcgctgtgcgcgtaccaccaatgctgttgccataattcttaagttttaattgttaattgtaaatcattcatcgctcaatccgaaggggccctttcttctgaccggcgatacaaagatagcaccttccctacccgcttccgcccctttccgctccttcgcacatcattgcacaccataaagcgtttttctgcaacttatgacgccttacgacgcgataaactctccttttttctttcgcaaaccactaatattcactaactttacatcataaaaacaagtaataaagaatatggaaaaatcctctttcatcccccgcagctacagcaaaagcgagctggcaatcttatacagtcccaacatcacgcccaaggcagccgtccgcaagctcaaccgctggatagccttcaaacccggactcctggaacagcttgccgccaccggcatgcttcccaatgccaagtgctacactccgattcaggtgcacgtcatcgtagaagcattgggagaaccatagcccccgaaaagccaggcgtttaaaagccgaatgcccggagtttacatctgaaactccgggcattccagcctgaaacacaaggcattccgggagcaaacacccggtctttcaggagcaaactcacggggttaccagccccatccacggcagcctgtccttatccagaaccttcccctgcatctcggtcattatctgttcctccgactcccgttcgtcataccgcccgcacggctgcctcacaaacagcacgcttcccgtccggcacaaatcctggtcacgcaccttcaacatatccagccgggtatagcgcctgtccggttcctcgatgcggcttatggaaaagatgaaatcggcaaggttcgcccagttggcgctgcccgaaatggtatacatgtctatctcctccagctcgttcttcccgttcagctttttcaggctgcggggatgcgccacgataatcacccagacaccgttgttacgcccccacgcctgcatctgcgtcagcatgcccttgatggcctgcgtctccgtgttgtagcgtccggtttccatttccataaagagatatgggtcgatgatgagatacttcagcggcatggtacgtttcacccgctccgcgcgctctatgatgttggcgggcgtgggcgaaacctcgtgcaggtccagatgcaccatgtgtctgtccatgaaagagacgatgggctgcaactgttcgcgggtgtatgccgccgtgttcaccttgcccagcatcaggcggataagatttgccatgtgtttgttcttgtcgggaacctcaaaggagaggtagcacacgttacgccccgtcttggccatgaggcggcaggtcaggtcgttcagaaaatccgtcttgccgctgttgggctttccggtggcaattatcagtccgccctggtcggttggatggaacacccggtcggtaagcggaccgtaacccacatcgtaaccgtggtcgtaattgccgttcagcacgttcataatctcatccgcacgttcgctcacggtgatgatgtccgacgtacggtgcggacatgccgagccgataatctcgcgcaccacatcggcgccgtacgccacaagcacgtcggatatgtccttgcagccgccgggcaggacggtgaacaggcatcgcgtaccgaaatagtcggcaagatgcttcacaagcgttcttccgggcaggtcgctgtcgccgcaaatcaccagctcctgcacccggtccagccaggggcggaaagcctcgaagcctttggaaaggtcgcttgccgcgccgttgggcacgctgatgacatacgggtagcccgcctcgcgcaacgtcagcacatccctttccccttcggtgacaatcaggcgcggaatattctcttcggcaatcagcagcgggttgatacagtcgatgttgtaaggcgggcaaggcgtagtgggcgaatcctggctccagcatttggtatagccggaagcggtggcatcgcacgagcggtacttcacgttgacgggctgcccgttgatgtagttcacataggcgatgcactggtacatcatccccgcagcgttctttttatcctttccgtctttgctgtccttgcctccgaagcagcggtgtaccaagcaaccgatacgcgcatcgatggctgttttcaacgagattcccatatcggcaagataacggcgggcggcaagctgtccggtatcggtggtctccgggtcatcggtcagcggcttgattttggcgattacctcaggcgacagccgtttgtagtcttcgggaagcatcgacaccacaaatgcagcgctccctccgcctgtcgatgccataccacccgtctctcctttcccggcactcccctttgccaccggcgaagctcccgccggacttccggcatcctgccactccgtgcttctgcgctctgtccagaagtccttcagcttcccgtgaaagtcgcatcccgcataaaagcagcagtacaatcccgtatcgcgcgaaatggcaagatgttttttcccgcacttgggacactctgctatataattcttccccgctcttctacgctcgggaaaatcactcaaataataaaacggcttcatcctccaaattttataatttataactcataattcaaaactcacaactctccccattctccgctcagcacgttccactccgctttcgcccccggccggggcggcgcatcgtccggtatgttcaccatcccttccagcgggtcgtcgtaaaagcgcaggccactttccttatccgtccactcaaactcgctgagcgggtggttgttgcgttgttcaccccgcatgtcggcaatgcactgcaaccgtttccgccttccggcatccgcggcatctttcagcatccgcagtccgccggcggatttcagcaggttgctcagccagcacagccgcccgacatgggtggatttcataaagcgttcctggcttgcgaagtaaggtaccagcaattcattcaccaagtacaccacgttggcgcaggcatcttcgcgcgccagcccctccttctgctggaagctgtcgatgagcggagttaaaatccgcatcttatccacccgatttttgttgatgaggtgaaagaaattacgcgcggcttccaggcttttttcctcagaagaaatccttccggaggatgtattattcttattatcctgtatagtatatatattatatatatccccctgcggtaattttaccggtaaagttaccggtaaagtttccgcggaatcatccgttttttccttctctttccagaggtaggaatagaacgaactcatcccgtacacattgtcgccgggtacgatgccgaacgctccgctcagcctgaccgcttccaccagataccgcgcgttcttaaacttcagcgccttgctgatatcatagaaattctccacgggataaaccgcatcctcgttcatgtaggcggtcatccccaacatcagttccaacagctttgcaatggtggaatccgtaattttccgacttttccactgccctatggtcttttgcagctcccgtacggaaagagtagttttatgtgctttcatagcatttatattttaaattgttttaaaaactgttgcaaaggtatacctttgtacccaaattacctgtacccactatgtaggtacaggaatcaaatatttctattttattaactaaaacaattttattatgaaatcgaacagatttatttccgatcatccggaattcggtgcattcctcaaaaaagaactggaacagcttgatatccgaagagaggcattccgttccacctgtcacatgaagcaaaactatcttgaggacataaaaaggggctccataattatgaggtagacagctacgagatcattctgagcgcatttaaagagttcacaacacctgaaaacgcacaacgtatctatcgggaaggggtaaagactttatttcctcaactgattttgtaaaaaaagatatttatagatataaaaaatattatataatatatatattgttttttatatagtttattcttaactttgcaaacaatttcttgcagctattggctttgcctatcctacttattatgggataggcaaaggcgtagctttctcaaacttttcatatcaaatcaataaacctaagcaaatataataattatttttcaatatttttttcattatatacagctatctttttactcacgacctatctatatctttctatatttttttaagtctttgtgaaaaataaaatcacaaatagaagttgtgtgatttaccaatacaaataaacataactagctgttgcttctaaaaaaatgaacactcacattgtaatcatggcgggtggcatcggaagccgattctggccgatgagtacacctgaatatcccaaacagtttattgatgtaatgggatgcggcaagtcactgatacaacttaccgtagagcgatttgcaccgctatgcccaatggaaaacttttgggtagtgaccagcgagaaatatacggatattgtaaaagaacagttgcccgatttgcccgaatgcaacatcctggcagagccgactgcccgcaatacggcaccctgcattgcctatgcctgctggaaaataaagaaacagcatccgcaggcaaatatcgtagtaactccgtcggacgcgctggtgataaacaccggtgagtttcaacgggtaatgcgctgtgcactcgattttaccgccacaaactgttccattgtaacgataggcatcaaacccagccgtccggaaaccggatacggatatatacaggctgcggaacagattaacggtactgaaatatacaaggtagacgctttcaaagaaaagccggatgtagaaactgccaaagaatacgttgcccacggcagctacttttggaatgccggcatttttgtgtggaatgtaaataccataaccgatgccatacgcaagtttactccggacctggctgctattatggacgaaatgagccgggatttctacacagcacaagaggctgacactgtagaaagactcttccccacctgtgagaaaatatccatagactacgctgtaatggagaaagcggaaagcatctatacactgcctgccgaattcggctggagtgatttgggcagctggggttcgctaagaaccctgctgccgcaggacgaacacggaaatgcaggtgtgggaaatggcatcagcctgcacaactgccacaactgtattgtgcacactgccggagagaaacaagtggtggtggaaggactggacggctatatcattgccgaacggaacggtgcactgctggtatgtagcttgaaagaagaacaaaatatcaaacgttttactttaaaacattagtgattatgaaacgaaattcaacaatgtctctgttcgcagctatgttgttgcttacaggaagcggctgtattttaatgaccggctgccagaaagattatgacggccaaatcgaaattcttcggaatcagattgaaaatggcgatgttaacgttgacaatctgctggaaaaaatcgaactgattgaaaagcagattgtaaccttgcaggaagcagccaaggagcatgccgaattcaaggagagcatcagcaagcttatcaaagacctggagactacaaaaaatgagctggaaggaaagattgccgagttgcagaaagcaatggaggagaatgaccagaacataaagaacatgattgaacagacagtacaggaattcgacaagaaattgctggaactgtccaaggaaatcgatgccgagatttctgccaaatacaatgaactggacggacgtatccggaagcttgaagagcagtaccaatccttgcaggaaaagcagaatgcaaccgaaaaggctatcagtgacttgaaagaagaaatagccaatttgaaagaatcgcaactggaagagaagcaaaagctggaaaatgccttgaagcaattggaagagctgaaccagaaactgaccgataacctcgaaagaatagacggtaaactcgaagaactggataatgcggcaaaggaaaatgcacagaatctggaacaactgagggaagataccaaaaacgacatcttgaatttaaagaatgaagtggatggtaaaatcaatgaaatcgatacacaattggaaggcatctccgatgcggtaagcaaactgcaggatacggttcagaacctgaacacccgctatgacgagcttgacaagcgtatcaataagctgataggcgattatgacgctcaaatagaaaaaatatgggaagccataaacaatggcggcggcactacagaccccgaattgtccaaactggtagaacaactccagaatgacctgaaagacctgcaagcccaagtggcagagcttaacgccaaatatttgtccatagaatcgctgtacggaaagctggatgaaagaatgggtaatgtggaaagcatcgtaaaagaccatacggcacgcatcagtgctctggaaaaacaattggatgcactgggagtacgtgtaactgatttggaaaaacaggttgaacagatgaaactaatctatgacacaaccattaaaaacatactagaacgtctgaattcgcttgaaaacggaagcgtgcccccggcagacctgagtcaaatcaaacagatgctgaacgaactgcaagcttacgtgaacaagaatacgaatgacattctccaactcaaggacaatcaggcacagcaggctgcactgttaagcgcactggaaagtaagatgaatgcaggcttcctggcactgaataataattataatgcgttgtcgggacgtgtagacgaaatttataaaagactggaagacgccctcgcagcattgcccgacctgggacaactgaaagctgatgtattgaagaatcagaaagatattctcgacttacagacgaagtatgatgaactgaacggtaaaatggataagttcgtcacaattacagaagtggagaacatgcttgccgactactacaacaaggaagagattaatcaattactcgcagggatatacgagcaactgaacaatgttcctaacaaagacgaaatgaacaagctgattgaagaggcaaccaaagaaatcaaggatcagctggctctgatgcagggagaaatcaacgaactgaaaaacaaatgcacggaactggaagagaaagttgatcgtttgttcaaccgcatccagagtatggtaatcattccacaatacagcagtaacgaggaagtggaactgaagccgcgtgaaggcaacaaatatgagctgaatgtaaatgtgaaaatcaatccggcagatgtgcttaacgaagtgaccgctttggaaggctacttccacatcgactccagagaagccattcctacacgtggagcaggtgatgcaggaccggcatttacagtagaaaaagtcgctgtaaaagatgcagccgaaggcatattcaccgttacggctacttgcgaactgcctacagtggatccggtgactcacaagatgccgtttaccgtagccgttgagtttgaaaacagcaacaataaccgctctacaagctataagggtgtacgctacgtgcctgcccaaagcgaagaccagactacatatgagttcaaatcgggaacagaagtagtacgcaccaaagcagacctgggactgagcgcatttgcagaagaggacatctacaaacacgctgtgctgggagaagtgaagaatgtcgacacaaaagtcattcaaattgtagataacctgccggtatttgcaacagaagttttaggctcctcaacggcaaacgaaagcaaccagaatatcccggttgtttacagcttgggcattatttatgacgaagccggaaagccgcaaccggacctgccaaactacataaaggtagacatgcacaacggagcgctttccatgggtctgactctggatccctcgcgcgtaaccgatgaccttaccggctacaaagtggtaatcggactgcaggcacgcaaggacggaatcaactatggagaacctgcctatatctgcgtggagttgcaaaagaaataaccggtaataacatttaaaacaaagcgtttatgaaatcactgaaatacatcatcgccggtttctgtctggcagctctgccgggcatggaagccatggcacaagaggtggtcaaagtggacgacccctggaaggactatcctgacaaaaagactttgtacaaagactactcacggtggagcatcggagtgaacatcggaatgccgttctatgcaggcgatttccgttccgtgagcagaggtaacaacaactgggcaggctatatgttcggtttgcagggaagctaccagttcaatccgattttcggagcacgcctctctgtggactacggaagcaaccgcgccggttcgcaacgctacgaggacgacttcgtactgctgcccaacggaaacacttactataacgtggactttccggaaggcggaagctactacaaggatttgtattcttcggttcactcatggaacttcggactgaacgcagaggtaaacctgctgaacctcttccgccgcagcgacggtgaccgccgctgggctgtggtgttggcaccgggtatctacctgcagaagttctcgtctactgtaaagaaccgctccaacgacgaacagtttgccgacaagctcgacaacaaggttaatctcggactgggaggcgaccttgccgtacgttaccggataaaccacaacttcgacgtacagttgaagggaggcatgatttggattaacaaccaggacttcgacggtatcaactccatcaataccaccaaacacaacagtatggttacggcacaggttggtctgatatggaaggtaggcaacagcaagggacgcaagaaagacaacatcatgtacgctccgggctatctgcctatgtggaagcgcgctacaaagaccgttacgaaagtggtgcacgatactatctacatcgaacagaaagtgcttgaaaaatctccggaagtagtggtatgcaaaggtttcccgaaagacttgcccgccgtatactttgaacgcggaaagtggaaactggatacggacaagtatgcacgcgaactcttcaccattgccaaaacactgaaagagaatccggaagtacagattgacatctgcggctatgccgaccatacgggcggaaaagccataaacaagaaagtgacgctgaaacgtgccgaagccttgaagaagttcctcgtgaaagtgggtatagaacccgaaagactgcatacgtatggtctgggcaaggatatgaccattgaaaaggaactgcgctacaccgaaaaggcacgccgcggcgaagtgaaagaaaaagaatagtcctaacctactttataggtaattaaaatagtctgtgtcagcaaagttttattttattctttgctgacacagttttatttacgccattattctacatcattatgtaaataaaaagttgttttttattattttagttagtaactttgccgcgcattagaacttatccattttacctgttccacgtaatttccaatgtgacaggcaatagcgtagcgtgctctacaaagaacaacacttcatataaacatattattcttttattttatacaattgaagtaattaataactactttgaaataatgaaacatttttttagtctaagaccttggatattggcagcggtagttcttgcttcggcagggactaccgttgccgcacaaggcaaaatggaggcctatccggccaatgagaaatggtttgtaagcggttcggtaggagccggagtatacgtaggcgattatgacatgcacgcgaaattcggaaaccgcatttccattacgggcgatgtaagcggcggtaaatggattactcccgtattaggcgccagattgcagataagcggaatgcacgcttcgggcgaagccatgaacggaagcagcgaatcgtggaatttcatgatgtatcatgccgacatcatggtggacgtgctgaactggtggtgcggtgtggacgaggaacgtacatacagcctcattccgctggtgggcggcggtgtggccaacgcccccggactgaataccaccacaggagtgcttaccgtaggtgtgctgaaccgctttaaggtatcggaacatctggacatcaatgtcgagataaaaggtaatctcgtaggggacaagctggacggatgcgccagcggaaagaaaggggaaggtgcagccgcactgactgccggactgacctacaacttctgatatacagaatatagaactaaacattgacaactgatgacaaataggacaaaggtactgtttctgtttctggcgatgctgggcgcgataagcgtccgagcatacgcccaacagaaaacctccgaaaagatttcgcccaaagaacggtgggcgtttgaaaccaatgcaatggactggctgttgctgttgccgaatgccaaagtggaatttgacctttcaaattccaccgacaatcggtgggtagtgggcataggcgccaaatggaacggcaatgccaaaatctgtatgaacgaacgcatacagatgaaaatcaacgattacagactggaagtgaaaagatatgccaaaccttcctttaccgtaaagacgggacagtccaagattcccaaattctggcgtacctactactggggcttctatgccggatacagcaaatttgccggagcatggggcaaaggcatcgccggcgatatgttccatgccggactgaccggcggatggcaactgcccgtatacaaatgcaaacagggcgcaatagacctggacctgggtctgagcgtgggagcagcctatgccgaatatgacaaatataaatatgaagataaccacctgatacgtacaaagagcagagacaggcatttcctgccctaccccgtagtgagcgatatacgcgtaggattcgtgtaccgcttcagctctatcagaaacaagtacagtcagagacaaaaataagagattcgtatgacaaaagattgtaaaaagaaaagtatatgggcgaggctgatagtgatagctgtactggcatgcacggcaagtaatgcgcaggcacagctcattgccgggagaacaaacgcactgctttggggaaacctgactccgaacttctcgctggaactggtgacatcgaaccggaccagcgttatggcgggagctttctacagccttgaccagaacccgctggattgcagcatcaaaggtgcggaagcgcaagtgagatactgggtgagcggacgggcaatggtgcagagcttcataggcctgggcatacagggcatgaggtataacgccacgttttcggatacacaccacttcggcgatgccgtaggcccgggaatggtgtacggatatgtactgccgctgggcaaacgcttcaacatagaattcagcgccggaatatcactgatgtggtacagggagaaacgctacgagaagggattgcccgaaccgggagactacaacaccaccggacacaaggtgatgcccatgggactgggaatttcgtgtacttacatttttaaataatacggagaatgattactgaaagattgaaaatatggatcctgcttctggttgtggcgggatgcggtaccggcactgccctggcgcagaaaatggtgaaggtatcgggtaccgtatataacattgccgaaaaccggaaagtgcctttctcggacgtgacggtggatgtgtatgccgccaagaccgtagccgtgggcgaggatatgaagaagatactggacagcaacgaccaggagaaaacattgctgctggaccaggaagggaaaacgaccaccgacgagaacgggtattatgaaatactggttccggacaacggtgcgctgattttcaaagtgggactctcgccctcggtattgaaggaagtgagacatcagatgaaaatagatgtgagcatcgacgagggagtgatgctggagagtgtgaccgtaaccgccatgcggctggttctgaaaccggaaccgaaagcgccgaagattatcggaaacatgctgattccgtacaataccttcaaactgccgccttacttcggcaaccgcttctcgcgactgattatacagccgtacgtactggactgcgaaacgaacgatacgataacctttgcacgcccgtccgtatacgacggcaaggaatatgccctgacgcaggaacgcaaaatgggctatgacatggaccgtgacccgctgcgtccgtacatcaaagcggaagcgctgactacaagggccatgaacctggactggacggataccatcattgtgcccgaccccaaccggaactacagttgctttgccatcgtgaacctggaagattacagcgcgtcgaactccagaacgtaccaaatcaatacgtgccagaccaaacgcccgatgaagttcctgcaatacaacctcttctcggagcagatggatccgttgcagcacaaggaaagggcgcagatagagaaaagaaatacgtcggacaagatacaactgtctttcctcatcaactccgaccaactgacggacacgcccgaaaacaaacagagccttgccatgctgagaaacaagctgaaagagatagccgaatctccgggtacggtattgaaggagtttcacgtggcaggtacggcttctccggacggccattacagcagtaacctgagccttgccgaaagacgtatgcgcaagattgaacaggagattacctccatattgccccaatataccctggaacgcgtttaccgcaacccgcatgccgaagtggctccgtgggaagaagtggtgaaactgctggaacgtgacggcaaaagcacggaagccggcaaggtgaaagaaattctggcaaagcataaggatatcggagcgcagggcagagcgctgaaacaactcgactggtacgctaccatcatcgtgccttatctggacgaactgcgcgtggtgaattataactgcctctacgagatataccgcgaaccgaatgacgaggaagtcatggcacaatacagggaaaaagggctgaaaggcagctacacacgttatgagtactggaagctgttccaactgataaccgatgaaaaggaactggaagctctgtaccgccgcgcctacgaggaatcactggaacaaaagcatccgtgggcgcttgccggcaacaacctggcggcttcttacctggagagggataccgtggatacttccatactggaaccgctgatagacttgagcatccactccaccgactattcgcgcatgaatgccgatggaagccgtacggaaatcgtgaaccggctggaagtggtgaccaaccaactgtgcatgtacatcaagaagggagacttcgagcacgccagcgtattggtgaagattctgccggaggacagcaaattcgacctgctgaaagcctatacatgggctttgggcggctacttccagggcggaacgactccggaagaaaaagaacgtgcacaaaagacttttgaaaccatcaaggcttcatcgccccagaacgaagtggtgatgtacatggcgctggataaccgcgccggcaacgccgccgccaaggcttcgcttgccaaactgccgcaggacagcgcactgacctggtacttcaaagctaccttgtctgccagagagggtgagatagagttcatgaatacggtgattgccctgtccgaatgtttcaaacgcgacaagagcttcgtggctaccgcacagaacgacggtgaatttaacgaggatatcatacaggcagctatggatatgtctaacctataaccataataaggattgaaaatgaaattgaaatatatgattccggcactgtgcatctgcacatgtacggcaatgccggaaatgctccatgcgcaggacgacagcctgaagaaggacagcaccgaaaggcctttcaatgcaatggactatgtattgcagaaacggtatatcccgcagggaagagaagtgaacaacagccagccgggcaagaatttctccctgtcggtaatgggcggtgtgaacaaactgaggggcagttcttcactgccggcatggttcaacggcgggattgccctgactaaggatgtaagttcattcaactcctaccgggtgtctctgttgggcggcttcaacgacgagctgaaacagggcggcatcgagctggaccacctgttcaacctgtccgattatatcggcgggtacaaaagcggcgcacacatcagcctgtataccgtattgggtataggcggctatgtgagcaagcgcgacggtatggatgccaaaatagccggcggagtgcacggcggcttgcaggcacgctatcatctgtcgggaaactgggactggtatgtggaacccaaactatacctctataccgacggaatagacggtgcggactgccccaaacggtatgatgtgggatatggcgtgtacaccggactgacctaccgctttaccggtcttcccatcaggatgaaatcggaagatatgggcgataatatgttcatagaagcggctatcggtacgcagggtgatttcggaaagcccgtgcgcaacaatctgccggcgctgcaaccgttgggtcctgccgcttcactggcgataggtaaatggttcatgccgctgggatggcgcatcagcggcttcggcggtttccactatacgttcaattcggacaacttcaagagcgaggaagtgtatggaggcggcagagcggaagtgctggtgaacctgaatacgctgatttcgccgagtgtggaagacccgagactggaagtgaacctttccgccggctacgaattcggagcactggcgcacagaagcagcgactatgccaagaagcttcgtacattccacggtcctacggggtctatgcaactggtatatttcctgtcagaccaaatcggtatcacgggtgaggcgcgatacagcaagagcttctatacgcaaccgttcaagagcggcatcacacaggacagacacatgcagaatgtaggcgtgatgttcggtgtgcagtaccgtagaagaaaggccgacttcgatgccaaacgcggcttcttccagccttataactttgcgtatgccactgtgggaaccaacttccccatgcgcaccgcaggtgtgaagatgaaggatattcccgatatgctgggacaacaggtaagcctgggtgtgggacgccagtacacgccgctgtctgccgtaagaggaagcatcgagattgggcggtatgcttatcagcacgggggtgtgtatccgctgtctgtcaccgctgactacatgctgaaccttaccaacatgataggcaattatagcgaaaaccgcatattcgacctcaacgcctttgctggtatcgtctatacgcaccacgaaatggaagacaagaattacttcggcatccagggcggtctgcaacagagcttcaagctgaacgaccgctggagcatctttgcggaagagtatctgagaggttataacggcaagattactccttcggcacgtacctacacaagcggagaatatacgtttgtcttaggagcttccataggaacaagttaccgtttttaaagcaatacataagcatcatgactatcgccattgattttgacggcacaatcgtagagcaccgttaccctaaaatagggaacgaaatcccttttgccaccgatacgctgaagatgctgattaaagaccgccaccgcctgatactgtggaccgtacgtgaaggaaagctgctggacgaggccgtggaatggtgcagggaacggggcgtggagttttatgccgtcaaccgggactatcccgaagaggatgccgcccatcacggcttctcgcgcaaggtgaaagcggacctcttcattgacgaccgcaacctgggcggcctgcccgactggggagacatctaccgcatggttcaggagaagctgacgtatgaggagttgtatcgcgataccgataaaactccgcaacaaaagagaggcggtttctggagccggttcaggaaataatccttttttgatatatatcaaacagtaccttaaaataactctttaaatttgcaacgtcatttagaaaacgatagagtaaattagtttttgaaagagaaaggttagtttttttagggtacactaaaaaaataccgggcagcacacggagcacaggaaaagattcctgccgtagctgtccggttttttatttgcttgccggaaccgggaggttgccggatattactgtttccggtattccttgggcgaaaagccggtgtgatgcttgaagtatttgccgaagaaagactgattggcaaagtgcagctcgtcggctatctcctgaatgctctgctcggatgatttcagcatggcttttgcttccagaatcacgagactgtcaatccactcgcccgccgtctttccgctcacctctttcaccatggtagagaggtgcttgggcgtaaggaacatcttgtctgcgtaaaaggacacgctcctctcctctttgtaaaactcgtacacgtaccggatgaagcgttcgaacaaatcttccttgcggcttttgggagtgcgctccttcacggcatgtccctgatagatgtcgtatatctcgtagcacagcgccatcagcaatccctgcgtaatctccttgcggtagggattgtccttcagcttcaccttgctccacaggaaagagtgatattcctcgaacgcctgcaactcgtcggcagtgacagcgatgcaagggcgctcctttatcatgaagaacatgggaaacagttgctgcatcgtgggtatcaccaggtccataaagtcgcgggacacggctatgaagctgcctgaaaaatcatcggaacgctcgccctgctgcacaatctgctcgggcaggatgatgcaaagcatcccttcacgcatttcataatcccgcaagttgatgttcagcttgcaccagcctttccggcagacggcaaagcaggcagcgttcagacgcgttggatatggcgtgaaagggatgtctcttatatcatcgaaaatagcgaaatcattgccgataaagtcaatcatgggcaggtgttgcataccggagatatcaacgttgcgtatctgttttgtattcattattcatgcgctttgccggcaaatataggattattcacggaattattggtttaaaaatcgtgaatgttgtcctaattcattattttaaagccgatgaagaaggtacgcggctgcgtgggaccgtagaaataaccggcatcgcggaactcgcccttatccaagtctttctggaagctgttgaatatattctgcacaccggtgttcagttggaacttgatatggtcgtgcagcacgaaggtatagttcagcttcaggttgaggtcgaagaactggggcgtggtctccatgcggtcttccgcgatgtatccggcatagtgcggtacaatcatcttgcccgtatacgtgccggagagggagaagtcgaaattcttcagcggagcggacgagaaggtgaagtagccgtaatagtcgggcgtgcggggcatgcgcttggtggtcaggtccttgccgtccacctgtgtccagacttcctcgcgggtgtagcggctgcgctgcgcggtaaagcccaactggagctgcgcttccttgccgtgggcaatcttggcgtcgaggttggcgccgtacacgcgggcgccgttgccgttgcggcgttccttgattacatcgcccacatcgtttttaccgatgtcctcgagcacgaatacgtggcgcaggtcggtatagaaaccctctacaaggatgtttgcctgccagtgtcccaggtgggcggtccagtccaccgagccgctgtaactgttggaacgctcctcgcgcaggttgtccgccagcttgatttgcacgccttcgccgcctactgcggtgacgtgcaggtcttcatcgtaggcctgcggggcgcggaaaccggtggagtacgtcagacgcgcctggaagtcctcggtaggcttataaagcaggttgacacggggactgaatatcagtttgtctatcaggttgtgcttgtccaaacgggcgccgacgagcatggtcagtacgttcatcttccactcgttctgcacgaaggcgctggcgatgcgtacatcctgctgcatatcgcggtgatagcccgtcatgacatcgtgcagggaattgttctgatactccagtccgcccgtgaaggtggcgggggcgaaaaggcagttgttcatgttgcctacgtacatgccgcctgccacccacgtcaggtcgtccgtcttgccgtaggcgttcatgtccttctgtgcgccgtagtagctgttgcggtcggtgtgctggatggagccgtacaaggagattttatgcttatactcgcgccagaagaggtcgtaactcagtccgccgctgttgataatgtgcttggtctgctcggtgatgtccgcctcgtggggctgaaggtcgaacttgttgccgccgcggcggaactcgttggtggtgtgatattccaggttgatacggctgaaatgcgtgggacggtagtaggcgcggaagccgaaggtgttcatattcagcttgcccagctcggagaaaccgtcgccgtcacggtcgtacggattgcggttgcggtagctttcgtagagggcgatgccgtaggagttgtcttttgacaccagggatacgttcccgcccatgtactgctcccaggacttgccgtccatgttggagaacatgctcgacacctggaaggagttgttaatggggtctttggtgatgatattgatagttccgcccacagcattggcgccgaacagcgccgaaccgccgccgcgtaccacctctaccctctcgatcatgttcaccggtatctgctccagcccatataccccgctcagcgcactgatgacgggacggctgtttatcaggatttgcgagtacgggccttccagaccgttgatacgcacctgggggaaaccgcagttctggcagttgttctccacccgcaggcccgactggtagttgagtgtcttggcaaggtcggtggagttcaccatctcaaagagcttggcgctcatcacgttcaccaccacgggagcagccttgcggctcacctcgttgcggttggcggacaccacgacctcatcggtcatgaagctttcctcttccatctggaaatgcaccaccgccgtaaagtccttgtttacttcaatcgccttttcctgtgtcttatagcctacggcggatacgcgcaacgtatatttgcccgccggcaggttcttgaactcgaactgaccttcttcattggacactgttccctgtccgctgcctacaatcaaaacggtggcatacggtatattctcttccgaaccttttacaagaacatggccggaaatcatgttgccttccctgatagggtttgcggcaacggctgcaccgatacctgccacagcaagcatcaacgccaatataatttgtttcatttgaataatcgcttttatttcagttacttaatgataccaattctgtaccggtacttggtacggcaagtaccaaaggcaggtacgacggataccaaacattggtacggcgagtaccaaagattggtacatcgaataccaagcatcggtacaacgaatacccaacgttggtatggagcataccaggcgttggtacaacactatcaaagggtaacggaataagggggagcgcggagagagggcatccgacacgcttttccctttatgacgggcgtatcggtttcgctttccatcacctgcaacagagagcgcatcgggtgttgcagctcgcagcagtccggcgtgtccgaactgaagtgcgacagcaggccgatgacaatcagcgagtcggtggagtgcgaatgttggttatggaaagggtgcgagtgggttatcagcaccccgttgacgtagtggacgtgggtaaacgccgttatgcttgcctgatacgccacgaagagcgccagcaagcataatgcgcatatggttctttttattcctctcacgtcttacggtttgtttcttgagttagggacggcaaaggtaatactaatttcggtttgtaccaaacagaaattcataatcgcgcttggaagcgggaacagcccactcctccggaatgaatttccactggccgagcgcacgcggctcgattaccttcttctgctcgatgtactgcatcaggtaatagcgcaaatccttgtcggtagagctgatgatgcgttccttcaactcgtcctgggagatgcccgcgcctttcgtcagcagttccccgccgccgttgccgcgataggagttcagggctaccgtgtacatcttgtccatgtggaacggggtgccgtctgccatgctgaggatggttaccttactgccgcacggcttcgtgacgtctaccgtgtagatgatgcctgcggcggagtcgaagttgaaactgaagttcttgaaagcagccctgtccgcagcgccttcgcggggttggtcgcggagcagcaggatgtggtcgtcgggcgaagtcatgcggttggtccataggtcgtaggacatctccagggcatcgtgtacttccttgcccgaaagtttcatggtatagagcatgttctcgtacttgtagaggttgaacatgtcgtacacgtaaatatccccttccttaatctgcgtgtcgtaggacaagggagccgccaatgaaatctcggcgccgctgatgtccaactgcaaggtatggatgaggtcgatgaatgcggaagaaccgaaataggcgggacgggtggagaccgtcttcgtgaagcgtccgattcttttcgatacgaaatcctgaatggtggcgtactgcggcgagaaacgtttcatgaattcaccgctgatgccgtagggggcggtttcggtgagcacgccgtcaatctgcttgtccgtaaccttaccgttgcgcagggtcacggtaatgtcgatgtcgctcaccacgatgccgttgctggcggggtccatcaccagtacggagtcgcctgccacgttctgcaccttcttgcattcgcgggcgtggtcgtggcccataagcacgatgtcgaagcccggaacattgcgggctacgtccagcgaggcattctcccggtatttgccacccatcagcaaggcgtcctgcccggcatggaacataccgattacaatatcgggacgctccttttcgcggattatcttcatccacttgcgagcggtctcttccatgtcgtcaaaacgaagcccccgccacagattctcggagagccacaccggaatggcgggcgttatcatgccgagaacggcaatcttcactccgtcgcgctccagcaccttgtagggccggaagtggggttcgcccgtagcggtatcgatgatgttggcacccaacaccggagcacggcagtcgcctgcccaacggtcgaaaacggcacgtcccgtctctacatcgtggttgcccatattggcggcatcatagcccatgaagttcagcatatcggcggttacgtggagcgataccgtgtcgatgtagttatagtaataggcggtgggctggccttgcaggatgtcgccgttgtccagcagaatcaggttgtccttataggtttcgcgcgctttctgcacgaatgcgtgcacgcgtgccaggcttccggcggcctcccgctgaaggatgaaatcgtggggatagaaattaccgtggatatcactggtctgtactattttcagttttacttctttatcctgcgcagcaactgctccaatcagcaggaacatccacgcaagacagcaggtcagtcttttcatttcgttgttctgttaatgtataaataccatgtgtaaatagcgcaaagatataataaaactcacaaaaaggcggtagggaaagattgtttttcgtacttttggcgctcattatcaaaaaaagaagctgacatgacacaaatctttcacagcatgatagctgccattctcggcatatcggaaaagcaaatcgggcagacactctccctgctcgacgacggagcaaccatcccgttcatcagccgctaccgcaaggaaatgacgggcggactggacgaagtgcagatagaatccatccgtacccattacgaaaaactgaaggaaacggcgaaacggaaggagaccatcgtcgccaccatccgcgaacaggggaaaatgaccccggaactgcaaaagcgcattgacgacacgtgggacagcaccgccctcgaagacatctacctgccctacaagcccaaacggaaaacccgtgcggaagccgcccgccagaaaggactcgaaccgcttgccaccctgctgatgctccagcgcgagcctcatcccgaacagcgtgccgccgccttcgtgaaaggcgatgtaaaggatgcggacgatgccctgaaaggtgcgcgcgacatcatagccgaacaggtgagcgagaacgaacgcgcccgcaacatgctgcggaatacctttgcacgccaagccttgctgaccgccaaagtgataaaaggcaaagaggaggaaggtgccaaataccgggattacttcgactgttcggagcccctgaagcgatgcagctcgcaccgcctgcttgccatccgccgcgccgaagcggagggtctgctcaaagtgagcatcagccccaacgacgaagagtgcgtggaacggctggaacggcagtttgtacagagcaacaacgcctgcgggaagcaggtggcggaagccgtgcaggatgcctacaagcgtctgttgaaaccgtccatcgagaccgagtttgccgcgcaaagcaaggagcgtgccgacgatgaagccatccgcgtctttgcggaaaacctgcggcagttactgctggcatcgcccctggggcagaaaagggtgatggggatagaccccggattccgcaccggatgtaaggtggtgtgcctggatgcgcagggcaacctgctgcacaacgagaatatctacccgcatccgccggtgaaccaaagcaaagaggcgtttgccaaactgcagaagatgatagaggcctataaggtggaagccatcgccgtgggcaacggcactgccagccgcgagacggaagatttcctgaaacggcagacgttcaaccgggaagtgcagattttcattgtcagcgagcagggtgcatccatctactccgcttccaagatagccagggatgagtttccggaatatgatgtaacggtgcgcggcgccgtatccatcgcccgccggcttatggacccgctggcggagcttgtcaagatagacccgaagtccatcggtgtgggacaataccagcacgacgtagaccaaagcaagctgaagaaatccctcgaccagactgtggagaactgcgtaaacctggtcggcgtaaacctgaatacggcaagcagccatctgctgacgtatatatcgggacttggtcctcaactggcgcagaacatcgtgaactaccgcgccgagaacggagcattcgcatcgcgcaaggagctgatgaaagttccgcgcatgggtgcaaaggcttttgagcaatgtgccggcttcctgcgcataccggatgccaggaatccgctggacaacacggcggtgcatcccgaaagctaccacatcgtggagcagatggcaaaggacctgggatgcagcgtggccgaactgattgccgacaaagaattgcgccggaagatacagccggaacgctacctctctcccaccgtcggaatgccgaccttgaaggatatcctgcaagagctggagaagccggggcgtgacccgcgcgggcctatcaaagtgttcgaattcgataagaacgtgcgtacaatcgatgatttgcgcataggcatggaactgccgggcatcgtggggaatatcaccaacttcggcgctttcgttgatataggtatcaaggaaaacggcttgatacacctctcccagcttgcgcagaagtatgtatcaaaccctaatgagattgtatccatccatcagcaggtacgcgtaaaggtgctcagtgtagataccgaacggaaacgtatacaactgacgatgattggggttagcggttagcgattaggggttagtgattagggattagtgccttgcggtgtgagtgcgcagcctgctaatcactaatcgctaatcactaacccctaatccctatatatcagcttgtccttgtcattgccgaaaaggttatcgcccaaagttgtaatcttatcgccggtggcaaggacatgacgaagattgtcgcatcccatgaatgcaccgtactctatggcagttacaccggaaggaagttccaaggtgccgcacaaccgtccgcatccgctgaacgcacgctggccgatgctcttcaagccatggggcagtttgatattgagcaggtatttcttttgggtaaacgtgtattcggggatagttgtggcattgcacttggacaaatccacgctcaccagattgggcatgtagttgcgtatcaacgtaaagtccgcctcgtccatcttaccttctaccgtaaggaagttcacatctttgggctgtatgcccgcacgaagcagttcgctggcaaggctgcccatggtggctatctgcaccaaagctcctaccggttcgccctctatgaaagcgaatgtctcccaccgcttgccgcgacgataggaatcgctgctacccagagggacgaatatcgccgttacactgtccgccagagcttcgggcaacaggttggggggagttttcttacgtatgcggcaaatcttcaggttggtgcatcccttgaatgcaccgtcttcgatgttcttggtcttgtcggaaaggattacctgcgtcaaggatgtttttccggcaaaagtgctgtcgccaagctgcttgcagaaagcataggacgggatgcaattggcgggatagatgtaaaagcggtcgggatgcgtaccgttctttccggcgtacatgctgatggatgcattggagatgtccagtatttgcagtttcttgaattcatcgcgcaggtggcggaaatccactgcattcagcttgccttgcaggacaaggtgggtaatctcgttcgcttcttcttcggtgagcatttccaccaaagtaccgggtttggcaacggtatatctcctggaagtctgggcggagacgttcgatatcataatgcccagtccggctactaaaagtatctttttcaggttcatgttttgtgtcagattgatttaattttcaaatataagaagaaagcgccaaccgtgaataatgatttctctttttattgctatttttgtcggatattaattaaccgaacttatttttctcatggaaaccatcggaaatgaatccaaagccaaacgttttggaaaagcggcaatcgacattgtttcattcgccgcgcttgccgtcatcatcattacaataataagcgtccctttcgcagccgtattgctgaagttaggaaaggaagaagccgatacgatgtcctatttcatattgagcgagacgctgatgctggcaggcgtattcctttccgcatggatagtatggcatttacgcggcttttcactggaagggctcggacgctctttaacgatgcgttggaaggactggctgtcgggaatactgctggcaaccgttctttatgcggtagggtttggcatatccttgtgggcaggtgcggtagagattgcaggagtggcattcaatccttcttccttactgatcagccttgtattcttcctgctggtagccgtgacagaggaactggcattgcgtggatttgtattggaacgcctgctgcaaagcggggtgaataagttttgtgccttgttcctctccgccgccctgttctccttgattcatataggcaatccgaacttcgactttctatcttttatcaacatacttctggcaggcatccttttaggttcatcctatatatacacacgcaacctctgcttcccgatagctctacactggttctggaactggatacaaggcccggtattaggctatgaggtcagtggaaataaattctgtaacggcttgctggcccttcggctgcccgaagccaatctgataaacggcggcgctttcggctttgaaggctccgtactttgtacggtgctgatgatagtgggaacaggagtgattttaaaattagcgattaacgattagtgattagcgattaggggttaacgattaggggttaagggttggtgatgagagtgggatgtggtttgataatttcttttaggcatggattacacggactatacgcatttcatggattttacggatttcacggaaaaagaataaggggtaatataccaactgttttgataatattaccccaaaataaagtaaatccgtcaatccgtgcctaaaaaaccaacaaataagataatattaccataatcacctttttgttttgacacaccattaatcactaatcgctaaccactaacccctatttattgtacatttttgttctcagttccttgatgtggtcggaagtgatgtattcatcatactccatcatcttgtcgatgatgccgttcggggtcagctcgatgatacggtttgccacagtctggatgaactcgtggtcgtgagacgagaacaggatgtttcctttataggtcttcaggttattgttgaatgcctgaatggattccaagtcaaggtggttggtcggcgtatccagaatgagacagttggcattacgcaactgcatgcgcgcaatcatacaacgcatcttctcgccacccgacagtacgcttgctttcttcagcacctcttcgccggagaaaagcatacggccgaggaaactcttcatatatacctcattgccctcgccaaactggctcaaccagtcaaccagattcaaatccgtattaaagaaagcggtgttgtccaacggcagataagcggtggtaatcgtaacaccccagttgaaagttcccgcatccggcttcatatttccgttgataatctcgaacaaagcggtcatggcacgcggatcgtgtgaaaggaacacgattttatcccctttctccacattgaagttcacatcacggaacagcaccgtgccgtcttccagcgttttcgtcagtccggctacttcaagaatctgattgcccggttcgcgttcgggagtgaagatgatgcccggatatttacgtgacgacggtttgatttcttccacattcagcttctccagcatcttcttacggctggtagtctgcttgctcttcgccacattggcgctgaaacggcggataaactcttccagttctttcttcttctcctcggctttagccttctggttctgctgttggcggagagcaagctggctggactcgtaccagaagctgtagtttccggcaaagaggttaatctttccgtagtcgatgtccacggtatgcgtacaaacggagtcgaggaagtgacggtcgtggctcactaccagaacggtatgttcaaaattggcaagatagtcctccagccaggttacggtttccatgtccaagtcattggtaggctcgtccagcagcaggttatccggattgccatacaaagcctgcgccagcatgacacgtactttttccttgttgttcagctcgcccatcagcacataatgcttgtcttccttgatgcccagtccgctcaataaagcggcagcatcgctttccgcattccaaccgtcgagttcggcgaatttctcttccagttcggataccttcagaccgtcttcgtccgtgaagtcttctttggcatagagttcttcgcgctgtttcataatgtcccacagcacggtgtgccccatcatcacggtatccatcaccgtataagcatcccacttgaagtggtcctggctcaatacggacagacgctcgcccggtcccaacataatagaccccgttgtcgggtccaaatcgcccgaaatagtacgcaggaaagtagactttccggcaccgttggcaccgattataccataacaattaccacttgtaaacttcaggtttacatcattaaacaacactcttttaccaaattgaaccgatacgttcgagactgtaatcatctttatatttactgttttattatgtactacttacaatttaatacctataactctgcaaattgcgggtacaaagatacgaaataatacggtaaaacagcttacaacgagttaacttattgcatgatatgaagttaacccgatacatacaacaaaggtaactgactgcaacctatcgagttaacttactgtccgcacaaggttagcgctctatttatagcacattacgctgtcaatctgacataaaaatattacctttgcagcgtttttggcaaaagccgtcaatttggcaaagtttttgctattaaaaccgtatcatattaacttaaacccttaacaacaatgaaagcaaaatcattttacaagaataacaagcataacaatatggactctaaagaaaaagaaaacatcaacgaagaagagttaaaagcacaagacgctcaagacgaaacttgtgaagaaacaacagagaaagaagaagaagttgccctgacagaggaagaaaaactcactcaggaactgcaaaaggccaacgctgagattgaagaccagaaagacaagtacctgcgtctctctgccgagttcgacaactaccgtaaacgtacaatgaaagaaaaagccgaacttatcctgaatggcggagaaaagagcatcagcagcattcttcctatcgtggacgactttgaacgcgccctgaaaaacatggagaccgccaccgatgtagctgccgtaaaagaaggtgtggagcttatctacaacaagtttatgacagtattgggtcagaacggtgtcaaagtaatcgaaaccaaagaacagccgcttgacacagactaccacgaagccattgccgtaatcccggctcccgacgaagctttgaaaggtaaaattctggactgcgtacaaaccggttacacgctaaacgacaaagtaatccgccatgccaaggtagtggttggagaataacatacacagttatatggaaaaaagagattattacgaagtactggaagtcgaaaaaacagcatcggtagaagagataaagaaagcctatcgtaagaaagctatccagtatcaccccgataaaaaccccggtgacaaggtagccgaggagaagtttaaagaagcggcagaagcatacgatgtattaagcaatccggacaagcgtgcccgttacgaccaattcggccatgccggaatgagtggcgctgccggcaacggcggaccgttcggcggtttcagcggtggcatgtccatggacgacatattctccatgttcggcgatatattcggtggacacagcggtggctttggcggcggtttcagtggtttcggcggattcggcggcggtggcggtggcgcgcaacagcaacgccgttatcgcggctcggacttgcgcgttaaggtgaagctgaacctcaaggagatttctaccggagtagagaagaaattcaaactgaaaaagtatgtaccctgcagccactgtcacggaaccggtgcagaaggagacggcggtgcggaaacctgccctacctgtaagggcagcggtacggtaatccgcaaccagcagaccatcctcggcacaatgcagacgcgtaccacttgtcctacctgtggtggcgaaggcaaggtcatcaagaataaatgtaaggaatgtgcaggcgaaggtatcgtttacggcgaagaagtcgttaccgtgaaaattcctgccggtgtagccgaaggcatgcagctctccatgagcggcaaaggcaatgcgggcaaacacaacggcgtaccgggcgacctgctgattctcatagaggaagagcaggacaaggaactgattcgcgatgagaatgatttgatttacaacctgttgctcagtttcccgacagccgcattgggcggtgcggtagaaatacccaccattgacggcaaggttaaggtaaaaatcgaatcgggtacacagccgggtaaggttctccgcctgcgcggcaaaggactgcctaacgtaaacggatacggaaccggagacctgctggtgaatgtcagcgtatatgtgcccgaaacactgaacaaggaagagaaaaaagcgctggaagaaatggaaaggtcggataacttcaagccgaatacttctatcaaggagaagattttcaagaagttcaagagtttgtttgattaaaaaaacaatgcttcccggcataaaaaaagctacatttggaatgtagctttttttatgccaggaagaaagtggcctctatttcaacaaatgcacaaactttgccggcaactctgctttatcggcgcaaacaaacagcttctgaccctcagcgtccagtaagaaagatacaccaccctgcgaagcaataaaaagctccacacccgccgcttcttctacaaaaacacagccggggaacagaggtgcaaacacttctttggtctgtcctttccacttcttgaatacgatttgcataggacaaaatgccatatatcctgctgcatgcaggcgctgcactaatttacgctccgactttggtgccgtatacagaacacaccaacgactcatatcattattagccatcatattgctttgtttgcttttctccaatctttaaataaatccttcacaaataatatccagccaacacatcccactcctgccaagaatacaaaacctataagaatcataatcttattaggcttggcggcacgcaaaggaaccgtagccggttgcacaaccgtatataccggagtaatctcctgcactttggctcttgccatctgcaattgtccggaaacctgggtataaacagtataagccagctcaacttcgttttttaaacgttcctgctcggcacgatagcttaacagaaccacattctggttggcatctgcaaaagtagcatattttttctgagctttctcataatccgcctttgcttctttatataatttctctgtaaaagctaaatcatgacgggctttattggtacggtaatttgtgatataattctgcaaacaatgcatcacggtatcagttaacgaagccgaaatcaaagggtcctgcatagtaacctccaaagttgtaacccctgtttttttatcaatcgtaaccaagatacgcttactcaaagcatccgccaccttcgcctcatccaatgtcaggtggaacggatcgatttttccttccttcttctccggtttatccttgaataaagacaaggtccaacccaaagccttgaatggcgcagacattacagcacccatccatgacgaacgctggtatttatccagataagcatataaggtcgtatctattttgcctttctggtctttgacccttacatcaaacaactccagcagaaaaggagttgacttaacgatatcgggatacagttcgggcgacagggcatcttctccgacagacccccctaagttgatgccagccatagcagccaatgcccccatactcccggcattcactttacttgcactttcgggagccaatgtcacttccgtagaatactctttaggaatgctgaatcctacaatcaagccaatcactgccgcaataccgcataccttataaagcattttacgatcggcccacactttctgagccaactcaatcaaatcgatttcctgttcctccggtttttgcggagccttttgtattttactttcgtccattgtccttatcacttaaagagattaaccaaagtagcaatcattgtgcctaaagtggcaatagaagtacccatacctaccatttcggccacgctcatacgcttacttggatccttagtcgggatgataatctcacacccgggctcgattgccgtcttactaccggagcgtatgcgggatacagtaccattcatataaaccacaaaagcactgcgcttcttggcattcgaagcatatccgcccgcctgattgatgtagtaacggctgttctctccctctttgtacagtacggtattaggatacatcacggcaccgttgattttcactgtgcttacatattcaggaataaacaatacatccccctcgcgcaacaccatatcataatcagaacccggatttttcaaagcctcatccagatgaatgcctaccgtatatacatataaagtagttgaatctgcaccgacctttatagccatgcgggtggcatcttcctttctgcgaagctcttcctccgacattttacggataagacgggctcctcttacataagcatcggatgtaacaccaccggctttagcgaccaggtcgctcaaacgttcattcttcttggacaacgcgtaagtaccggtaaacaatgcctctcctattatccccacatttttctgcttgcgataagcagggcttttacggacatacacttcatcaaaaggctccaaatagaaattttcgctccccgctcctatcagcaagccgtctttcaggtcaaaggtaaatgtctggcctacaatattactgtcgtccgtgcttttgggagatttaatacggcgcgatacatctattttcgttgtagaagccgcttcaagcaagccacccgattccaaaaccaaatcctcgatggtcatcttgtcggcataaagataagtacccggatctgcaacctcaccatggatagtcactgtaggctcttctttcagatcctgaatgctgggaatataaagtatatcattcttttgcaaaggaatgtccgcaaccacacctttcaacaagcctttcaaatctatggaaataacctcgcgcgtcaaatcctcatgttcacgattgattacggcacgatttaggaaagcatctccacgtacaccttccgctttctttatcaactgttttacggtattcacctctccgctcagctgatacaagccctcacggtaaacagcaccgcgaatctctacacgattctcgaaacggttgagaacggaatccaccgtaagcatatcaccgtcttccaggcggaataccgaataatccatttcgtccacattgaaaatctgatgctcgcgtccgctcttgcgtacaagacggatggcttttttatatgcatcgcccgtaaagccgccggcatatctcagcaacgtaccgattgtttccgtaggcttcatttcataatacataggacgctttaccttacccaatatctgcaccagggtctgataaggattgacaagaatcacatcaccgtcctgaagacggatatcatccttcagccgaccttccatgataaaatcgtagatgtccaaatctgcaaccgtctttccgtcgcgtataacttttatgcttcgaagactaccgattttatttactccaccagcccaatacaaggcatggaaaactgatgcgaatgaagagagggtgtaagtacccggtacgacaacttcacccataacattcacctgaatggaacggatttcgcctaacgtcaaatttatttgcgtattgggagtttctcccgtaaccccggcatatatcttggcaaattcgcgtttcaaataatcattggcttcctctacggtctttccactcagataaaccggtcctaacttttcgatttgcacagtaccctcaggcgagattttttcgcgaatcgtagtctgggaagctccccaaacatcaataataacttcatcgcccgcccccaaacgataattgtcgggtgttgccacatttatattgggttcaaaagtcagatattcgttatcgaaaatattatgtccgaaaatctgttgtgtaaaagcgtcttccgcgcttttaggaccattataaccataacccggctgtccattgttattcacccccgttccatatccattgcgttgctgggccgatttcgcccgcagccctttaatactttgcttttgggaaccgagattatccaagccggattcatcctgagagatattcttgtttttgttctcgtaagttttctgcgtacgtaaacgggagttcgcttctcccatgaaattggcattttcctcagagcttccgtccgatttgcctgaatatttagactgtattctctggatttgttcttttgtgactcctttcttcatcaattcaaccaacatctcctgttgtgtcttcccctgactctgagcctcttgcacgtacagaatgacttgttcatccgtcatttgttgggcaaataccacacttgataccgtaaataccaacaaacacaatagtataaatttacgcataagtaagatctttgattaatcttttagttatctagtaatgtttttaattggggacaaaggtaatacattattttcataatatacatttatttccttttgaagttttggaaaaagaattaattccgggcttcaatacaaccggtattttgccacaaacaccacttataccaaacagtatttttccaatcatccaatagagttaaacgtctttaccatacggttttatccataatatctccgataaatacacaaatatagaaaaaatgccagacagaaatatttctaaaaaatcaggcaattctttttgcaaattcaaataaagatgtacctttgcacctcgtaatcgaaaacccattgccgctatagctcagttggtagagcaacgcattcgtaacgcgtaggtcgccagttcaagtctggctagcggctctcctaaaaaacgctgattgtcaaataaataatcagcgtttttccctttttaaagccgtcgtgcgaataaaaaaattatttttctcattccctctattccccacatatcataatagaacagatggcatttacctgcaaaaggagtggctaactgaagcagatagctttttatatactcacaaacatatttcaaagcagacttatctctttaattatccgacagttcaaaaaaactccactgtgtagaacgtatcaataagcagggcattttactcatgtatgatactcaaaaacattttcgtaatttgccaaacacaatatttatttctacatttgaattttaactaattacacaatatcaccaaaatgtaagtatatgagaaaattattattcgccatgttggcatgtacaattacacttgcctttgcatcgtgcagagaaaaaaaggctaaagacaaggttaaagaccgtgtagaaaatgtaaaggaatctgttgaggaagccctcgaagaggcgcaggaccagattgaagagggagcagatgaggtaaagaaggctttggatgaagccggcgatgaaattgaaaaagccaaagaaaaactggaatagaagttgccggaaaactgtccaaatattcgcacagtaaggaacagaactccatttaacttagaaacattatgaaaaagattaatttgctactgttttttctcctgcttgcatgcgctttgcctgcccaggatggcatttccgtctttatcggcagagctaaccgctacgcatctgtagaactctctgactacagaaagcgcctatgcctggaatataatatttcaaaccattccttagacgattactacagacgctgtggcaatgactggggaaatgtgggaattgcacttgagatagccagaacttcaggaaaaaaaatgcgtgatgtatgcgactattacaagcggtatcatcgttacgggtggaaccgtatccttgtggagattggcataaagccgggaagtatgtattataaccctttctataacagagtccatcaccacagtgactgctggcatgaatactataattcatactgtgaacgccatgacaaattccaccataagaaacacaaatacaaaaagccgaaaaaacaccacaagagacattgtcgacactacgatgacgatgatgacgacgacgatgacgattaatcgggatttgaaatccaagtgctgaaacattcgaagagaatgtgtgtgtgccaaaactaaaatccgcttactatttttttaggcacggattacgcggaaaacacggatttcacagaaaaagaataaagaaaatctgtgaaatccgtgttttccgtatctaaaagaaatcgtcaagtatatattgacacatccccctcttcctgtcatgaataaaacaagggaagcattctctttattcccaaatcttgctaactttgcccgactcaaaaacaatcaagattatgatggaaaaaaagaaaaaaagaatccttttcggagcactggcggttattcttttcataggcattgcaagtgcgggtacaatgtattactacctgttcactccgcaatttcatccgcaaaagacagtttatatctacatcgaccgcgacgatacgacagactccatatacaataagataaaagcacaaggaaagcccaatagtttcaacggtttcaaatggatgtcccaatggcgcgattactccggcaacatccacaccgggcgctatgcgatacgtcccggcgagaacgtttaccatgtattcaaccgtttctacagaggataccaagcccccatgaacctgaccatcggaagcgtacgcactttggacagactggcgcgtaacgtagggaaacaactgatgattgattccgccgaaatagccggagtgataaatgactctctgctccagcaacggctgggatacagcaaagcgacaatagcctgccttttcatacccgaaacctaccaggtatattggaacatgagcgtagaggatttcctcgaacggatgcagaaagaacatcagaagttctggaatcgggaacggctcaataaagcgaaagccatcggcatgacacaggaggaggtatgcaccctcgcttccatcgttgaagaggaaacaaacaacaaccaggaaaagcccatgattgccggcctgtacatcaaccgtatccacgccggcatgccgctacaagccgaccctaccatcaagtttgccctgcgagacttcagcctgcgccgtattgccaatgcacacctcaccatcgattcgccctacaacacctaccgcaacctcggcctgccccccggccctatccgcattcccacccccataggtatagacgcagtcctgaattacaccagacacaattacatttatatgtgcgccaaagaagatttttcaggaacccataattttgcagccaactacgccgaacacatgaaaaatgccagaaagtattggaaggcgttaaacgaaagaaagattttcaactaatatcataataaaacaaaagcaaaaagctatatttgcgattgttactaaaaccatgattaacacttaaacactaaaaaatgagcaaacaactcttacttggcgatgaagccattgcacaggctgcattagacgccggcctatccggtgtgtacgcctacccgggtactccttcgacggagattaccgaatatatccagacagcagcgattactgccgaaaaaggtatccacaaccgctggtgttccaacgagaaaactgccatggaagcagctttgggaatgtcgttcgcaggaaaacgttcactggtctgcatgaaacatgtaggcatgaatgtggctgccgactgctttatcaactccgccgtgaccggtgttaaaggcggcatcattgtcgttgcagccgacgaccccagcatgcattcgtcacaaaacgaacaagacagccgcttctacggcgactttgcattgattccgatgtacgaaccgagcaaccagcaagaagcctacgacatggtttacaacggatttgccttttccgaacaaaccggcgaaccgctgctgatgcgtatggttacccggctggcgcattcccgttccggtgtagaacgcaaggcgcaacagccccagaacggggtttctttcagtgacgacccgcgccagttcatcctgctccccggcaacgcccgcaaacgctacaaacttctgttgcagcatcaggacgattttgtcaaagcctcggaaaactcaccttataacaagtacatagacggtcccaacaaaaaactgggcatcatagcctgcggcatcggttataactaccttatggagaactatcccgaaggctgcgaatttccggtattgaaaatcggccagtacccgcttcccaagaaacaactgatgcagcttgtagaagcctgcgacgaaatactcgtactggaagacggacaaccgtttgtagaaaaacaactgaaaggttgcctcggcatcggcataaaagtcaaaggacgcctggacggcacactgtcgcaggacggagaattgaatccggacagcgtagcacgcgccgtaggcaaagagaacaaagcggaattcgctgttccctcactcgtcgaaatgcgcccgccagccttgtgcgaaggttgcggacaccgcgatatgtacaccgtgctgaccgaagtgctccgggcagaataccccagccacaaggtattcagcgacatcggctgctacaccttaggagccaacgctcctttcaatgccattgactcctgcgtagacatgggagcttccattacaatggcaaaaggcgcctcggatgccggagtccatcctgcggttgccgttatcggcgactccaccttcacccactccggtatgacaggcctgctggactgcgtaaacgaaaacgccaacgtcaccatcgtcatctccgacaacgaaaccacagccatgaccggcggacaggattcagccggaaccggccgtctcgaagctatctgtgcaggtatcggcgtagcgcccgaacatatccgcgtagtagttccattgaagaagaactacgaggaaatgaggcagataatccgcgaagaaatcgaataccgcggagtatccgtcattattcctcgcagagaatgtattcaaactttagcacgtaagaaacgaaacaagtaaagccatgaaaaaagacattatactttccggcgtaggcggacaaggcatcctctctatcgctaccgtaatcgggcaggcagcccttaaagacggattatacatgaaacaggccgaagtacacggaatgagccagcgaggcggagacgtacagtccaacctccgcatcagcgaccggcctatcgcttccgacctcatccctacaggcaaatgcgaccttatcatatcactggagcccatggaagcgctgcgctatcttccctacctcagtcccgaaagctggctggtaacgaacgaagcccctttcatcaatatcccccactatcctgccgaagaagctctcaaagccgaacttgacaagcttcctcacaagattgtactgaacgtaaacgaagtagccaaagaagtgggctctccacgcgttgccaacatcgtgttgctgggagctaccattccgttcctcggcattgattatcagaaggtacaagacagcatccgcgacattttcctgcgtaaaggcgaagccatcgtagagttgaacctcaaggccttggttgccggtaaggaaattgcagaaaacctgatgtaaatcaaaataccaataaccatgaatgacaaatactgggaagaaaagatagaaaccatgccgcgtgaggagttgcacaaactgcaactccggcggcttaggaagacaatcggcattgcagcaaattccccctattacaaacaagtttttcaaaagcacggcattacggcagacagcatccggtcgatagaagacatccggaaaatcccgtttaccaccaaggcggacatgcgcgccaactaccctttcggacttgtggccggcaatatgcacgaagacggtgtacgcatccactcttccagcggaaccacgggaacgcccaccgtcatcgtccactcccggcacgatctggagtcctgggccaatcttgtagcacgttgcctatacgcagtaggcatacgaaagaccgatgtttttcaaaacagttccggctatggtatgttcaccggaggattaggtttccaatacggagccgagcgcctgggcgcactgaccgtacccgccgctgccggtaacagcaaacggcaaatcaagttcatcacggacttcagaaccaccgccttgcatgccattcccagttatgccatacgcctggcggaagtatttcaggaagaaggtatcgacccggcatcgactactctgaaaaccctcgtcatcggagccgaacctcatacggacgaacagcgcaggaagattgagcggatactgggtgtcaaagcctacaacagtttcggcatgaccgaaatgaacggtcccggcgttgcctttgagtgtaccgagcaaaacggcatgcacctttgggaagattgctatctggttgaaatcatcaatccggaaaccggcgaaccggttcccgacggtgagattggagaactggtcctgactaccctcgaccgtgaaatgatgccgttgatacgctaccgcacacgcgaccttacccgcatacttccggatacatgtccctgcggacgtacgcatctgcgcatcgaccgcatcaagggccgcagcgacgatatgtttataatcaagggtgtcaacatcttccccatgcaggtggaaaaggtattggtgcaattccccgaattgggcagcaactacctcattactctggaaaccatctgcaatcaagatgaaatgattgtggaagtagagctcagcgacttatccaccgacaactatatagaactggagaaagtacgcaaagctatttcccgccgactgaaagatgaaatccttgtcactcctaaagtgaagctggtcaagaaaggctccctgcctcaaagcgaaggcaaagccgtcagggtaaaagacttgcgggataacaaataatattctaccggtatgtccagttccaaccgttaatgaagccgtgccataccggtaaatatccctgcattatactcccgaaactcccggaatttacttcccaaacaccgggcattccaacctaaaacttcaggcatttcgggagtaaacacctggagttaaacgagcaaaagcctggactttcccccctcactgcaaccaatccgatttttactgaactctctgatcttcaagaagcaaaaccgtaaaataacgacaaaagaaaaaggaacggtagtcaaccaagattaccgttcctcttttatagaaagccgcaccgatgatgtgatgaaactccgtatgacatgatttgagtgctcgtcctctttgtaatccaccgactcaagagttaccccgaagggcgtggcccgccattgagaactgaagcttgtctcggtatttcattagaattgatgagtttcccgatccaatcaatgcggctattttttctacttcaaaggtagtgagtttctacgaaagaaacaagaaaaacaagaaaattgtttgcctgcatctaatgttttcacatttccacaatactgcccaaaacaaaaagcgccgattacgtattcgtaatcagcgccttgcaggtttattcttttaccccggcttatgcagcttttgctttagctacaatggccttgaaagcttccggatgattcattgctaaatcagccaaaaccttacggttgatttcgataccagctttgtgcagagcacccatcagtttggaataagacataccttccagacgtgcagcagcgttgatacgttgaatccacaaagcgcggaagtttcttttcttattcttacggtcacggaacgcataagtcaaacctttttcccaagtattcttggcaacggtccaaacgttctttcttgcaccaaagtaacctctggtcaatttcaaaattttctttcttcttgctttagaagcaacatgatttactgatcttggcatagttttacttgtttttgaatgttagcgccggtacttcacgcaacggacttaaagctaatgcattcggttaataactttaataatacttcgtacgcttttgattacttcatagctaagagttccttaacctggctcatattcgttatatcaacggttgtagagtaacacagatttctcttttgcttcttggttttcttagtcagaatgtgactgtgaaaagcgtgctttcttttgattttacctgttccggtaagagtaaatctctttttagaaccggagttagtcttcatctttggcatcttacttatttttaaattatttaattatatggcaacgcactatacctgcggcgttactcatttctttagtcttcgcttttgtcttcggccggagctgctttcggagcttctgccggcttcggtgtggcaggctttttcggagctgcacctttcttcggagaaagctgaatggtcatcctctttccttccagaaccggcatttggtctactttcgcatagtcttccaaatcattggcaaaacgcagcagcagtacttcgccctgctccttgaacagaattgaacgacccttgaagaacacgtatgccttcaccttgtcgccatcttccaaaaagcctttggcgtgtttcagtttgaagttatagtcgtggtcgtctgtctgaggaccgaaacgtatttccttcacatttaccttaacctgcttcgccttctgctctttctgacgcttctttaactgataaagaaatttagagtaatcaataatacgacaaacagggggttgtgcattcggagaaatctccacgagatctgcttccatttcctcggccattttcaaggcctgagctatcggatatactttaggttccacctcatcgcccacaatgcggacttctttggcacggatttgctcattaatccgatgttgcccttttaagctgtcattcttcattaaataacgtttacttccagtttgtttcttgtttattactaccaaattatttttttgttaagtaaaagcggtctttagaacatcgtatgtatgctatgcttttacaattgggcgcaaagttaccatttatttatcatattttgaacttcttcgttcacttttttagcaaaatcttcaaatttcatggttccctggtcgccttcgccttgcttgcggacggaaacttctctgttttcagcctctttctcgccgacaatcagcatgtacggaatacgcttcatttcgttgtcacgaatcttacgtccgattttttcgttacgctcatccacaatggcacggacatcatatctcttcagatagtctttcacttcctgagcataatcattgaacttctcgctgataggcaggatagccacctggtccggagtcagccacaacgggaacttgccggcggtatgctcgataagcacggctacgaaacgctccatagaaccgaacggagcacggtgaatcattaccggacggtgcttttgattgtcggctcccgtatattccagttggaaacgttcgggcaggttgtaatctacctgaatggtacccaactgccaacggcggccgatagcatccttaaccataaagtccagtttaggaccgtagaaagcagcttcaccatattccactctggctttcagtcccttttcttcacaagcctcgataatagcctgttctgccttctcccagttctcatcgctaccgatatacttctcacggttcaccttgtcgcgcagagaaatctgtgcttcaaagttctcgaagtgcatagactggaatacgattgagataatgtccattacgcgcaggaactcatccttcacctgatcgggacggcagaagatgtgcgcgtcgtcttgcgtaaagctgcgtacacgggtcaagccgtgaagctcaccgctctgctcgtaacggcaaaccgtaccgaactccgccagacgcaaaggcaggtctttataagaacggggtgagttcttgtaaatcatacagtgatgaggacagttcatcggtttgaggaagtactcttcaccttcttccggcgtatgaataggctggaacgagtccttaccatacttggcatagtgtccggaagtgatgtacagcagcttgttgccgataggcggacacattacttcctgatagtcgtaacgggcctgaatgcggcgcaagaactcctgcagacggatacgcaatgcagcacctttcggcaaccacatcggaagtcccttgcctaccgtatcggagaacatgaacaagtccatctccttgccgattttacggtggtcgcgcttcttggcctcttccagcaatacgagatactcatccagcattttcttcttcgggaaagtgataccgtagatacgtgtcatcatcttgcggtcttcctgtccccgccagtaagcaccggcaacggaagtcagcttgatagccttgataggcgcggtagtcatcaggtgaggaccacggcacaagtcggtaaacgcaccctgcgtataagtagtgatgtgaccgtcttccagttcggaaatcagctcacatttataagtttcgccgcgatcgccgaacatcttcaaggcatccgtctttgaaatgctctctctgacaaccgcttctttcttggctgccagttccgccattttcttttcgatagcgggcaggtcggcttccttgatagcagtctctcccggatccacatcataatagaaaccgttctcgatggccggaccgataccgaactgtatgcccggatacaactcctgcaaagcttccgccagcaaatgggcgctggtgtgccagaaggcatgcttgccttgttcgtcttcccatttatagagaaccacttcagcgtcttcactgatgggacgccccaaatcataaacttctccgttcacaccacaagccagtacatcctgtgccaaacgtgaactaatgctttctgctatttgcagtcctgttactccttcgttgtattcgcgaacggagccgtctggaaatgttatctttatcataatgctatgtataattcaaattttagaacgcaaaaatagctaattctttattgatattctattttttagcaaaaaaatgttactgttgcgtattcgtaaaacgcttgataatattgtaagcggaaacgatacccaattcgcctgccttgctcaaatcagaaattccctgcctgttattgcccaggaagatatgcgtcaggccacggttgaaataggcttcggcaaaatcgggattcagtccgattgccttgtcgtaatccgccaatgccgcacggtaatctttcagcagcgacaatacattgccgcggttataataaccgtaaacaaaatcgggcgccaattggatgacatgatccaaatcatttttcacaatatcgtaatccatcgccgttacttccgccttctttacttcttgcgcaccggaaacggcaccctcgttcatgccggcttccgctttcttgtactccaactgcttgtagcgcaccaaagcacgcatgaaatatgccgggaagaaagtatcatccagcaggatactctgtgtaaaatcgtctatggaacttgcaaagtcctgcaccagatagaaatccaaaccgcgcataaaccgctttccggcatttttttcgtctgccacaatatccgatgtatgggcgtctatcaatgcgaagtggaaacgtacctgctcttctgtcagaggcgactccatattggtgatgcgcaacggtttggggaacagtttggagtgattcaactcgtctatatacttgtgataatgcacggtacgttttacgtcgctcagcttctcataataggtcagcgcatacataggttcgagcttgatagtcacgttacggtcttgcacacggccgcgatagtcgctcttataacgctgttccacttccgaatcatccgcaatcacaatcttgcggtagttatccatattcttgtcggacttcttacgggttttgccgttatcctttccggagttgccgtccgcattatccgccacatccttgtcattgccgccggttgtcacgccgttgcgcttgtcgagctgcatcttcataagcttgaactcatcctgctcggctcccttgcggtcaccaatcttcttgcgggcctcggcacgatggtagtaacccgccgtgaagttgggatactcttctatcactttggagtagtcgctgatagcgccgcggtaatcgcccgtttgtgcacgcagcaaaccacggttgaaagttgccatcatattgtccggctccatcttcagcacaaagtcgaaatcttctatcgcacggttatcgtcacctacctgtgcacgcagcagtccccggttatagtgaccgaggaagttattggggtcaatatccagcgccaggtcatagtcgctcatcgcacctctcaggttattctgatggaaacgcgccaaagcccggtttatgtagttgcccgaattacgtgcgctcaggtgtatcgcctggtccaaatccttttcagcttccttgtagtcggattgctgaagacggacaatggcacgggcggcccaaccgtcggggtcgtaacggtccatatcaatggccttatcaaaatccttcaaggcctgtatcgtatcgttctgcttgagattgacctcaccgcgcatcaggtacgcacgcgtatagcggggagctatggcgagcaacttgcccaaatcctctttggcagcattgaaatcctctttctgcatatgacaaagagagaggttatgccaaagtacaacattctccgggtcgtacttcaaagccgtcttgtagtcctcgaccgcaccgtcgaacttatcctggcggatacgtgccaaacctcttatctgataagcgcctacaacaaaaggattgcgctgaatagcctgatcgcaatccgcttccgctccctgaaaatcgtccaggttgatttttgccagcgcacggaagaaataaggctcgtataaataaggcttcgcgttgattacctgattgaaatattggatagaaagcacgtagtcctcgaaatacaatgcgttgcgggcaatggtcatcacccgttccgtattgatttgcgcatataacaacgtgggcaataacagaattgccagcaatatcttttttatcatcttgtcttataaatgcttgtaaacaaaacaaaagtagcgtttattcatttacatatcaggatataccgaagactttttatattttttgagccttttataccttattatatggtttgcttactttacggttttcaccttataggtacagtgtgccttacctttcagcatggcattcagttttccctttatcatctgtctgcgcaagggcgacagatggtcgataaacatcttaccgtccaaatggtcgaactcatgctgcatcacacgggccagatagccttccacaatctcgtcatgctccaccaggtcctcgtccaggtacttcacgcgtatcttattgcctctcttcacagattcgtgaatgcccggcaggctcaggcagccttcttccatagatacctcttcgcccgatacttcgaggatatgcgcattgatatatgccttacggaaacctttatattcgggataatcttccgacaacacatccaggtctacaaccaccacacggataggcaaaccgatttgcggcgctgcaagtcccacgccatcggcatggtccatggtttcgaacatattctgaatcagttctttcaggttcggataatcgggagtaatgtcctccgctacttttctcaatacgggttgtccgtatacataaacaggtaaaatcatttctttaatttatgaattatgaattattttccaaacatttataaagaggagaagcgcctgttctccagataagtctgcaggataatagtcgcgctgatttcgtccaccaacgccttgttctgcctgtctttctttttcagtccggcttccagcatggtgcggtgcgccaagaccgaagtaaaccgctcgtccacatactctaccggcatatcgggcaaccgcttttgcaaggaacgcacaaacggctctatccgtttcatattctcagaagcttcgttattcatctgcttcggcagtccgacaagtatccgctctaccggttctttcgccacgtaatccatgataaaggcgagcagttcatgggtaggcacagtggtaagcccgttggcaatcatctgcaacgtgtcgctgacggctatgcccgtacgttttttaccgtaatcaatagctattattctactcataatgggctacaaaattacgatttatatttgaactctttttcatacgtatcaaaaaagattttgcctatggtgaaaatcccgtctgatatacatcaaacaggtttttcgccataggcaaaattacacatgccggtataggaacgaaatcaatataccaacttcacattatctacatagaatgaattgcccggagaaccgatatatgccccgccgtgactggacgtaaactgcaactggatatgtgtggggatatcatcttccgttccccatgccacttccttgataggcacgctttcgcccttactgttcaccgcatagcgttcctgcacttgcaggcgcatcatgtgcgccttgtattcggggttgcccgttatatcgccgtacataatggaataagtggcattgttgcgccagtcgtccgttgtagtgtaataacgcaccaccaccgtacccacgcgtttggcatagatatttccgtctttgtcttcccagcgtttctgcaaaaagaggttcatttcggggaagtcctttccttccacatcggttatcttgctgaaaccggtggcatgaacacgtttttcacggtcggacatcttcaccttatagtcaaactgaatggcaataggtttcttggtgaacgggatgcccgaattcagtatcttctgcggattcttcgtccccttgatgggctcgtgtacatcgcccaaaaatatggaaccggcagccagcaccgtaatatccacaatgccgaacacctttacgctttccatacgggtgtccatacgggcacagaagccgtcgccccgcttctccggaaataccgaagtattggttttggtgatgcctgccacacgcgccatcacgttggaagtagcccacggggaaccgcccatattcttatacggcttgttttcacggatagttgccgtaggaccgatagcatacacatttttggtagcaccgccgataattcccgattctttaatctggcggtcaatccattgatccatatttccgaaaggaatcatctcaaccttatgctgtgccgatactgctacgcagcaaagcattgcggacagcaaactcaacattcgaagtcttttacgaatcatttctctattctcctacaatcagttaaagttcataattccactgcttcagcgcaaagccccagttgtcctgaaccaattgcaccgtgcggtcgtcatatttatatttattcttcttataacctttcttaccgcctacatactgctcgatggcagtgcgggcatccgcaaaaccgggtatggacagcgcatcgtagatgtgctccgtcattcccatggcatcagcttcgaagtcctcgaacttcacttcaatcagattacccgccggaatgcttgccttgtccgcctcgtacttatgataaagtttggcatagacagacaggatgttctgctccagttccgcaggagtaatatcctgaagtttcaacggctggatagtattcgtgaagaaactgcgcgtgctctcgaacaccgtataaggattacgcatcaggtagatgaacttggcattggggaacatctttaccagctccttcacacgtccggtatgcggcgggttcttgctgaggaactgcgtaccgtgcgtattccacaaggaaatcttgatgagtctggtaaatgtttcctcaaataccttcaactccgcctcacttatatcgtcgaacaacagatacttgtcggcatactcctgctgttgcttgggtaagaaccagaagttataataggtataaggcatcatgtttgccaacgcaaactcttcctcctgcggcaggtctaccgccagctccatattgtccgtgggacgcttgtcgggcatcagccagctcatgtttttcttgaagaaaggctgtccccacatcatcagatgcggaaatacggtctgatacgttgtgttatagccgaaatgcttgtcgcaagagaacacattatgcacgaaagttgttccgctacgccagtgaccgaggataaatacagggtcgtgctccagcggtttgtccgccaacagcttctcatagcgtttgtcctgcaagggagccaatgtagaaagcatgcggcaaacggctttcgtcaaccggaatttacctttgtacgcggcatctatttcacgtccctttgtaatggcgttgaacgttttccagtctgcaccgaccagtgtgttaatcggcagtttgttgaattctaataaacccattcttgtttaattgagaattgtaagttgaggattgcagaacagcctttcgggccagtccgcaattctcatccgactcttatttgttaatgtttaattttcatttcttaataatcactgccactccctgacgttccagttctttgacggctttctctacagcttcgtaatgttcgggagcgatgcccagcttcggcaagtcaagcacagggagttcttcggatacatgcatatccttatcttccacgcggtcgataatcataccaacggcgctggtattgttggttatcgggtctatcaggatgaaagaaccggtggctttgttggtctgataagggtcaaagaagagttccttggcagtagtcaacactacgcgggcaatctggttcaactgcatcggcagggtctctttcgtcaaccggccgttgtcaagggagagtttctccattgtattgacatctaccttatacttgatattgtcaatacgcgtacggctcaaattggtagtttgcttgatgaagaacgatttgtttacatccatcggttcctcgtccatccacactaccatggcttcgaagttacgctccatcatcggaagattgtcgggatgtaccagcatctctccgcgtgatacgtcaatctcgtcttcgagcgtcaaggtaacggactgcggcgggaaagcataatccaattccccgtcataggtcacgatgctcttgacgcgggacttctttccggacggcaatgccatcacctcatctcccttgcggataatacccgaagccaccttgccgcagaaaccacggaagtcgaggttgggacgcaacacatactgtaccgggaaacggaaatctttcaggttgtggtcgttatcaataggtacagtttcgaggaagtcgagcaaagaagtaccgttgtaccacggagtgcgctccgacttctccaccacattgtcgccgtcaagcgcagaaagcgggatgcaagtcacatcggggatgcccaacggagcgataaacttcttgtactcgcctacaatttcattgaaacgctcttcggagaagtccaccaagtccatcttattgacggcaagcaccacatgcttgatacccagcaaagatacaaggaaagtatgacggcgcgtctgcgtgatgacacccgtgcgggcatctaccagaataatcgccagattagcggtagagccgccggtaatcatgttacgcgtatactgttcgtgtcccggagtgtcggcaatgatgaatttacggttattcgtggagaagtagcgataggccacgtcgatagtaataccctgctcacgctccgccttcaaaccgtccagcagcaaggcatagtcgatgtggtcaccggcattacccatacgtttgctgtcgcgctccaacgcatccaactggtcttcatacaatttcttactatcgaacaacagacgtccgataagcgtggactttccgtcatccaccgaaccggcagtaaggaaacgaagcaaatctttctgttcgtctttatcaaggaaagcctttatatcaagtcttgaatcatccatttcttaattctcaatttttaattcttaatttcattagaagtatccctcacgtttcttctgctccatacttgcttcctggtcaaaatcgataacgcgggtggtacgttcgctcttggtggtagtcatcatctcttccacaatcttctcgattgtatcggcactgctttctacagccccggtcagcggccagcaacccaacgtacggaaacgcaccatacgcatttcaatcttctcgcgatactgttccggcaagcggtcgtcatcagccataatcaggttgccgtcaatctccacgcaaggacgctccttggcaaaatacaaaggtacgataggaatattctccagacggatatattgccagatgtccagttccgtccaattgctcaacgggaacacacggatactttctcccttatggacacgcgcattgtatatgtcccacaattccggacgctgattcttcggatcccactggtggaacttatcacggaaagagaagatacgttcctttgcgcgcgacttctcttcatcgcgacgggcgccaccgaaagccgcatcgaatttgtatttatccaatgcgtgcagcagcgcctgtgtcttcatcaagtccgtatgcactttactgccatgcgtaaaaggtcctacacctgcttcaaaagcttccatattgctctctacaatcaggttccagccgtacttccgggcatactcgtcacggaattgaatcatctccttgaacttccacttagagtcgatatgcatcaacgggaaaggaaccttacccggagcaaaagccttttcggccagacgtaccataaccgatgagtccttgccgatactatacagcatcaccggattctcgaattccgcagccacttcgcggataatatgaatagactctgcttcgagttctttcaaatggctcagtttatattcttctttcatgctatattatttcttctgaattctcggtaaaattaattccaataatttattgacggattcttccaggctcaacgcagatgtatccagtgtcaatgccggatgtgcaggagcctcgaatggcgcggaaatacccgtgaagtttttaatttctccacggcgtgcctttgcatacaagccttttacatccctgcgttcgcattcctcaatgggcgtactgacgtacacttccagaaaatcatccttcccgataatattcgccgccatttcgcggatgtcgttgctgggactgataaaggctgcaatcgttataatgcccgtatctacaaacaatttggaaacctcggctatacggcggatgttctctatgcggtcggcttccgtaaagcccaaattgttattgatgccgctgcggatattgtctccgtccaaaatacggcaaagcaatccgcgtttatgcaactcacgttccaaagcgatagctatcgtactcttacccgacccgctcagcccggtaaaccaaatcatcacgctatgttgtttcagaagctcttctttgtcttgcctcgacaacattctgtcaaaaataggatatatattattttctgtcataattcaatcaaaatggccatattaagggaataaggaatatggatataagaaaagtgataatattcaacggaagtccgatgcggacgaaatccgtaaatttataattgccgataccttgtactatcaggttggtctgataaccgataggcgtcgagaaacttgccgatgcagccatacagataaccacaaagaaaggcgtcggacttacgcccagttgcgatgaaatggaaagcgccaagggaaaagcaagtgcagcggcggcattattcgttatcagttcggtaaacaggtttgtaatgacaaacataacagccagcaacaccgcaggcccgtaatgatccgtcagtccaatgatgtattcggccacggcatccgccactccggagtttaccattgccttgctgatggcaaaagcacaggcaatcgttatcaggatatcccacgatatatatttggtatatttacgggccggaaagatttttgtccatgccattagaatggttgttacggacacgaaaaagaacatatccagtttgatatccggaaaagcctctttcactgcaggcagttcgccaaccgtagccccggttatcatcagaatcagcagggcaagggcaaaccaacgtttgcctttacttgcaacaggctccgtatccttaccgttggcaagcatcacgaagacagaagattcaccccacgtctgcacaaaagaatcatcagccattaccaccaaagtatcaccttcccggaaatactcattctccaaatcctgcacataactctggccgttacgctttatctctttcacttcagcgccataatgacgtttaaagttaaaatccttcagtttcttgttgatacccggaaaacgaggacccaagacagcctctaccctatgcagatcactatgttcttccggttcatcatccggtttcaccgcatctttacggacatcgggcaatagtctggaagaaaacagaaacagatagataataccggttattgcaataaaaataccgactttcccaagttcaaacatagtaaatccctcataaccggcatccagtatcataccgtgtaccaccagattggtggaagtgccgattaaagtacagatacctcccagaatcgtcacataggacaaaggaatcagaaatttagtagccggaagctttaccgactcagcccaacgttttataatcggagcaaaaattacaacgacaggagtattattcaagaaagccgaaataaaggaaatcgtaggcagcattcggagttgtgctttgaaaacggtggttttaccttgtggcaggagcttcttgataagctgccccaatgcaccggactggcgaatcccctcactgaccagaaacagcatggcaaccgtaatcatacccttattgctaaatccttccagcatttctttaggtgtcaggattccggcacagagaaacagtaccaccaccgaaaagagcaccatccccggacgcattttatccagaaccagggctatcaccatgcccagcaacgctaaaagcacaaatatgatttcaaacgtcatatatacgagtcgttatttaattacgcctaggctctactataaaccaaggattcaacaaatcttccttattgtactgtagcggttcttcttttccggcctgatatacttccataccggcagcacgtgcaatggcatgccctgctgccgtatcccattccatggtgggagcaaaacggggatatacatccgccttaccttccgccaccagacatattttaatggaacttccactggaaatcaattctacatccgagtggcaacgcttcatcttttcaatgtaatcttcagtttcgggagacagatgtgagcgggatgccacaattacaaatttatcgtgattatccttaatcggcaaatgaacggctttcgccatcaactcttccaacgacgctccgctgcgagctgtaaaatccgaaagtttgtaagcacctaatgtttcttcagcaaaataaagctcccgctttaccggaaggtatataacccccattaccggaacggaattacgaaccaaagcgatattaacggtaaactcgccattccgtttgataaactctttggtaccatccaaagggtctacaatccataaagtagtccatgcacatcgctctgtatagggcaaatgctttccctcctcgctcaataatggataaggcgttttttgcagatagccggcaatagccgcatgcgctttcttatcagcaatcgtcaaaggagaattatccgctttcttttctatttgaaaatctgaggtcggatcgttgtaaatagagaggatatctttgccggcacaaagtgctgcatcaatcgcatcaagtatatattgtcgttccatattgtattctcaaaatatataaggtgcaaaattaaaaacttttttaccgccaaaagtttttaattttgttttataacttcttttaaacgaaaaagagatatttataagtacttttcacaatcacccaaaacagagttttcataatcattttcaacagattatgaaaaaggcagtaacttcccagttaccgccctatcttgaaaggagggaaatacccctttcttatgaattaccaaaaagaattcaaattaattaatgcgatacagcagccaagcaccctggaaatcctgacggttagggtatttagccttgaaagcatcgcgagcgctggcagcagagtttctgtcggcatatgtacttacgattacacgatacatagcggcgtctgcattaaatgcaatgacagcattataaccttccttatccaagaagtttttcaggttctccgcattggctttcacaccaaagctaccgcatacaacactataatctttcagtccgtcagcacctgataccaccgtcactttctcttcacggatcgtacctaccggtgtactttctacaaccttagcttctaccggagcgctaaccacaggagcaacttcctctaccggtgcagtagtctgcggttctgccagttcctgctgtttagccttttcgtatgctttcttgtaagcgctttcactcgatttacaagaagagaatgccagtacaatacatactcccattcctaacactgccaattttttcatcttttctttttattttttgttagtaactatatctattctcaaataacactcaatatttacggaaaacatatttcgttccttcatagtccaaccgcatcttcttgtttgtcaattcttcaaccttgaacgttctctcgccgctatctccccaaccaaagaacttcttatagctatccgaatttacaagttcttcatgaacagactcatttcctgaactattatccggccacaaagttatagaaatttcatcatctttcaacttataataaccataaaaagattcatagcttccactttcattcatacaatgtgccagaaaactacctttttgaaaatcatagaagatactgtctactttctgcactttaccatcgggatactgatattcgcgcaactgccattttcctacccagtcggaaccgccgtcattcatacaagacgccagtcccagcgctacacacatcaaaagcaatagtattgtcccgttcaacaatcttttcatatatctcttttttgtttaggaagcaaaagtactccgaaccgcttatcttagcctctcctatgccgttaaatataattaaaatacatgttttatctctttttgaggcatatattttcaaaaaacacgaattaatgaacaatcattcaaaataaattgttagctttgtcatattagacctaataaaaagaaaggagtattattatgaaaggattaaatgttttagcagcttttttgggtggtgcagcggtaggtgctgccatcggtattttgtttgccccggaaaaaggagaagatacgcgtcacaagattgcggaaatccttcgcaagaaaggtatccggttgaaccgtaatgaaatggaaaacctcgttgatgaaattgcagcagaactgaaaggcgaagcaaacgaataaatcaaaccacatttcaaaacaaagccactatgtttgcagatgacaacagtattgagaatatccagcagctatttttcgatttcaagaaatatctggaactacaaaagaaatatacccaactggaagtagcggagaaattaaccatattgctctcaacgcttatacttgtattgttggtcgtcatcctcggcatggtggctttgttttatctctcctttaccctggcctacatactagaccccatagtaggcggattaatggtaagttttgccatgataagctgcttccatattttattgattgcgttaattgttgcgttccgcaaaaaaatcattattaatccaatgaccaaattcattgccggattattcatagataacaataaaaactaaaatatcatggatatgaatgataccgtccagacagagattcttacactggaagagctccaacgacaaaaggccgaagcattagaagaattacgtgcccaaaagcaggtcatgaatgataccgcccggaacttatttgccccgatagcccctgctgcaaataaaggaacagctatcatgcgtgcatttaataccggtatggctgtattcgacggagccatgcttggaataaaactgatgaaaaaagtcagaaaaatattcagacgctgaaaatcaaccaggctataaaggaatcattcatgcagtatctatctaatcaattttgtatatataattgcccgcaaagaattaggtattagcctaatagagaaacggacaaataggttttgcatgaattgagaaaaagaaataaaatgtatttgtctcatcatttgcagaaaatgcaattcgtttatcatatatttccatcctcctcttcttttaaacatttccggagaaaaacggaaatacagcaagctttcctgaatattataaaacttagctccattcatcaacatacgtatccataaatagtaatcctcaaataaagggaaatgtcggtatccaccggcagccaatactgcgctctttcgaaacattacaaccggatgatttataggattacggcgttttgcaaattgtctaatatcatcaggcagttccggcaactttcttacagactttatattggatacattatcttcaaactcactaatccacgcaccaacaacatcaatatccggatatttcttaaatacagccaactgtttttcaaaacgctccggcatggcaatatcatcagtatccattcgggccacaagttcgtgcgaacaatactttaacccttcattcaaagcttttcctaatccccgattggttaccagagaaagaactttcagatacggataccttgtcacatatgaatctataacattatctaattcgtcacctatcggaccatcctttactagaataacctcgtcgggacatatcgtctgggaaaaaagactatccaaactttctcttaaaaacagaggagattctttgtaatatatagaaagtataacagaaaaaggcatgaaagttatccaaagattaattagtatcgaccaaaatcaactgaaagcagatgcaagccaacacgctgattttcgggtggaagttgcatgtaatcaccaaacatcttagttaagtattcatgatagtgttccggtacaggcaattcggtatcctcaaacggtacacgtataggagttccatatattcttttgttcagaattgaggttttatactttgtcctaccatagaagaatccccaatactcactctctctgcaattcagccgctccacttgcctccggaaaaagtcgcgtacatagccacatctcaacggaaaagccaaatacattagaattttcttcttcaaatcggcgcttttataggttcttaacgacaactgatagcataacagaacctttgcacaaacatattgccaatatgcaaaaaatctattcgatgacacattgtccagcttaaacacatccacaaaaattccttgctctccggttgcgggaatatagccttcgggttctttcagaatagtatcccgcaatttaatcttcgaataatcaagcggccaatccactaacccctcttgtacataatatttattactattcaattgttccttacagactttgagaaaacgattataattagagtgggtcataataatatccaaatcatcatcccaaggaataaatcctttatgtcttatcgcaccgatagcagagcctcccaatagataatattctattccattattcttacatacaatatcgatatctttaattatatcaaggattaccaattgcaaatgacgtaattcggtcataatatatcaaagttttattttcgctttaattgttcctgtttatattcataagaatgttcgccttcagccctaaagtcccggtggtaccgttccagaacttttttaaagacctcttcatattcaggaataaacaaatcattccggttattcatatggtatataatttcatcagccaatggatacaacaaagaaagattattagccccattgtaaaaattagtaccatttatacgaccgggagaaacatttaaaatacgattgtctgtaccacttttctttaattccacattcacgctttctatgaaaatttttaaagcagctttacttgccccgtaaacgctgaaaaaaggagaagacataaagcccgcaatgctcaccattactgccgtatagaatggcttcctgctgtgtatgctaccatagaaatgcttgataatacgcaaaacagatgttgtattcacacttatcatatctactatagtgtcttcctgcatatcctcaaaaagagatagcttcccgaatcctgctgtaataatcaaagtatcaatatcgttaaattcatcaaacaatgaatagtcatcgaacagcaaatcgaatttccgaaatgacaccaaatgctttatatctgatggaacctgactataatccggttccactttgtccactatcaaaaccgatttctcttttactaaacgcattgcaagagccagcccaatcccgttacttcctcctacaataagagccttttgtttctttatcattccaaataagtattatgcactccctttctatacaattctatcaattctgcaatcatcacagactctttgggttgtagtcggtaactgcttaaacggtgcgtatatatcattgaaagaaattcctgcaattcataacgtaagccgtctccctgataagtataaaagtatttcttattttgattctgatcttcgtacctcacttcgaaataatttgtgagccaccagggagaagggacaagaacataaccacgcgtaccggaaattacaagatttccttccgttttcactcccagccctaaagtgatagaagctgttgcttttctatataccaaatttccttttgtaaatatatccaccccattctgtaacttcgaataaaaatatgtatcctttacatccgtccccagcaactttacgacggccattaacggaaaggaggccaactctgtcatacatccgcctgcttgcccggcatcaagttcgcgcacatccccgctgaccaatttagacaatgacgcctttacatctaccacctcaccaataacaccgcttttaaccaaaacaagtaaatgattccatgccggacaatgagctgtcttggaagcctcgagcaataccaagcctttatcccgtgccaatgtataaagttcatcggcctctctcccactcaacaccatcggtatttcgcacaatacatgtttacccgccgttaaagcccggtatatataattatagtgagtaaggtgaggggacgcaatataaacagcttctatatcctgaaagaatgacgcaagattatcagttgccttatccaagccaaaacgagaagcgaatgcttctgcatcgacataatccggattgtacactgacacaatttctgaaccgctgacacttgccgcttccggtataaaacgttgtgcaatacgccccgttcctattatacctatctttattttctccaaaacttcttcacgcagttgcgtgctacttattccttcggtacgcggtaaatacacaacctgacaaaactctttcagataatcaaaatgtccttgccaatcagaacctatggcaaatatatccacgccaaatcgctgaatatcgtctattttctgtccgacatagtcttctattacaatttcatcggcatatccggtttgccgtacggcttcaatacgttccaaaacattgttacgcacattaagctttccgcgctcccggtcaaagctatcgcttgtcacaccgactatcaagtaatcgcctaattctttggcacgccttaacagattgatatgcccctgatgcaataaatcataagttccgtatgtaatgactttcttcataagcgttaaagactcagcaattatagattctacaatattcttccctaatcttttccttatcaaaaggagctaacaattggttataatttaccgtatctttagacatcattaattcagaaaccgcatctttaaagccctcataatcgtgataattaaaaacccggtatcctttatctcctttcaaataatcaccaatccttacgcgttcggaaataacaactggagtatggtgttgaagcgcctctaaagccaccaaagaaaaagcctcataacgtgaaggcactacgacaacactcgcttgtctgtatagacacgccaactcagcatctcccaaattctgatgaagaataaaatcatcgcgtttcactgttcctttacacacgcaatgaacctgacaattatcaggcagggtataaagatgttctatccctttattggtatcattacgccctataaacaataccatattatcttgtttctctacctcatccaaaacattcgtatctgttgtactccaatgaggaatcttttttacattaggatggtacttgccaaaaaagcgggtatcttcattgtttatagtaacaattgtatccactttgaacaagaccggtttcaggaacaaatgaaaccacagtttccctttcatgggatgccggagataccggaaaggatgaaaatgaggactatatacgattttcttattcaaaccataggccgcatttattgcctgcaccgcacccggagacataaaaccgtgaatatgtactacatcacatctgctattctctatgtaacggaccaatgctttggtatcgtatttatacttacgaatccactttacatacgtggcaggcaggtcttccacgggcataacatccacatcacatgcagacatcagagcatacaagtcatcacaatgtcttttaattccaccgttaaaagacaaagtcttatcccgaataataagaactttcataaatcttcaaatactattgtgcgtattggcagcaatccattgtcttccagcatcaaagcagagcttacctgcaatatagagtaaaggaaaaagaatgctatgacaatcatctgactgcgatgattcttaaagataaaaggaaaataactaagccaaatacactctataattctataataagcagataatctgatagagaaataacctatttgcgaaaacaaaaggtaagtaacgattgaaagaaatgccccccacagaatgatctgtttcaacctttccgtagcttcaatcttatcaatactatatattatcaatccaaaaaagaacaaacgccgcaatgttccggaggagaacagcacattagaggaagcatccccgttttcaccataagccagtatccggtctcccatagcgctatcccccaaatacattgaagccatatccataaaaatattgaatatttgattcattgataacagtacgcataagagacaaatgcctacaatatgaattttctttaactttatgttgagaagaggataaaaaggtataaagcaaaaagctgtataatgaataaaagaggccaataaacataccgttatatattttatctttttccgcatatacgcataatatacagccagcaaagtcaatgacatggcaagcccctgacgtatagcattcatctcataagctatataataaaagctgcaaaacaacatcatcgaaaggtaaaaccctttcctaaaggccagcttacgaaagacaaacagtttcagtccgaacgaaagaataaaaataatcgccacaaaaacctcatagtttccgccaatatattttactgctttaataagcaaggcgaataaaggttctatggggtcatcatactcaaaaatttctttatagccgggatagtcagagcctacttcatacctaaaggatgatataaagaagattacagagaaaaaaacgtatgcaaataaacaagagtatttctccttgttcctaacattgaaattatccaataaaaaagtcgcatacgccaagacgaccaaagtataataatacattaaaccttgaactttacaaatcctataattttacctccgaaggagtaccagtgtttgataaagtttcttatcaaaagcattccacagaaagccctcaacagataatacagatacacaaataaggctttataattacgcctcattatccaatcctttttttgtaatgcagcaaatccaaggctatatttatagactttagaaatatctgcattgttagccggatgataaacggctgttcggtcaacaaaaaaaccacatgttctatagttctcaataaaagagtacaggtaatccgtttcttctcctgacgaaaagtaagttcccactcccaaacgctcatcaaacatcaccgtattttttcggacaaaaatattatacgaaatacatgcctttaaaacatcctttttatatagatatgccttttgtgaaatatgacaaactcttttggttacagtatcccgggtagtaactgcacagaatcctacttcttccctactgctaaaggcttcatttacttcctgcaaaacatttacctcatagtagcaatcgtcatcgggaaaacctatgatttctcctttacacatgcgcaaggcaatattccggttgtatgataatccttttacatcgctacgtatataatgaataatgaagtttttttcaaaattgcgaactatatcttcaagttcatgatgctcgttttgatctacaatatataactcaaaatccttaaatgtctgtttagagagggatacgcacagacacctaacctcctctacccttcctaaggtcgctgtaatcaaagaaaatctcatctgattctattttttaccaatgatacatcgtcgggcgttacctaatatgtgtgtaagtttcgtgccgattatacgagctataatgattttcatcttttcatcccatgatttccatgagcctgcaaaatgatggatggtatatgtattgggagttatggttatcttgccagtcttataagattttgctgtcagaaaatctgtaggtaatggaactatctttttgtttgttatatagtctgcattcaacacttcatccatgataatgggaagcggagtatcattatataatccgttaggaagcgcaaattctttcgatgtataatactccaatacttctttcacccaaggagcctttttaggggccccgaacactcctgcctcaagtccctttgccgcttcatatcccaatatataatcattccgaagtaagtcattgaatgactttataacctcaacatccatatccatgtatattccaccgtaattatatactgcataaagacgtatataatcagcagcaaaagcatatttcttagcttcgaaagcctgttttacccataaagacctattcaaatcaaaacggtttaaatcccatagtataaattcataatcataaagcttttctttccaactcttcatgtatttttttaagtctttagggatagggtcattacttaaccaacagtaatgtattattttaggaatcatattataaatataaggctaaagatttatgtataattcttttcatatcaaaaaatagagagccattgtttcactacttgctctgcagaaaaacgttgtactttctttatggcactctcggcaagcctattacgtgtttccgaatcaagcatcatatttcttacagcttccacatacaaatccattctgtcattctttacggttatgccatttacattattttctataacctcatgcaagctcggataactgtcgaatgcaacgggaactaccccgaactgttgtgcttccgtaatggtcagcccccaactttccaatgctgaggtcatgagaaaaacagatgctttttgataatatggaagaggatttttatttccttcgaaatatatattctttatatcattttcagccacataacttttatagttattctcgtcacttccgctccctacaataaccaacttccaatccgccaacctgtcatcactcataagttctttccaactccttagggcaagagaaattctcttagggttctctacaagcctcgaaacaataagtactactttttctttttcatagattttctcaaaaggaaagaatatatcgaacgagagagtattgggtatcacactgaacttatccgtatcctttatatgtccgaaagctgtaaaaggttgtatcaattcagacgacaatagaaccactttgtccgaatagtcataggtatctttatatttcaaaggaagcgcatataaatgctttactttcaatatcggataagccgtcaaccttaacatattcgccataagcccccggcttttccaacatttaagtacactattactccacgaaacatcttcccgctctacgccaggataaaggtgatgcgcaaatattatctttatcttctttccgattgcctgccttatgccttttgctaatcctaactgcccctgaagcaatactacatctatatctttctttactatataatcaatcaaaagcgccacattcttcctgcttccaagacatagtcttccatcaaaaacagtcttcttataaaggctgtctatcccttcataataagctaaataacatctacacagacatctcttcctaaactccctgcacaatgtatcggtaattctctcagttcctcccaaaaagggactgacatcaaatgtatttacaaaaagaatattcatcaatcaaaaaagccaagtccaaacttcttatccaaccttaacaatccacccctccaaaaatcaggctttatatgtaatccatctatcacacaccagttgtccgaaaagttaatagtatgcaagccatcaggatagttgcttctcggctgaggatataaaactgctacttctgtttcttcatacctgtccaaagatacagaatcaacacaccagataaccgtacctgctccataatgttccagacaatcctgcgaaggtctatacaactgaccgtttactctaaaaaaatcacctgccatacgactacctctaaggcccttcttcacacagactccctccttgggatagtaattcccccaaatattatcatcagaacaccataaatataattcttcctgatcacagcctttttttccaccgaacaaccaatatttcccgttttcataaacgatgttgggatcggataccggcatatccaacaacgttttcacgcagatgcactcttcccttacctcatcatagcaatacagtttcagtttatccgatgctatattttcaggaagtatgtagactttatcgttccaacgaagaatatacggatatgacagatggctttttatggacagtattttctttctccttactaattgaaacgttttagtacaaacagtcagttttaccaaagttgccgctcccccaagaaatagtgcttcctctgcaagaatttccaatgtgtcgtccgtctctttcaaaataaaaggatcagcaaacattctatcacgatacttatgcttcagccaatgcacactacataaatcaaaatttccgaagatgacatccgtaggcgtcgcttttataagacctatgttataatcataaatcttataccgttgggataattgttttatatttatcacgattacttgaagttaagagagtcaaattatacatacttgcttattttctcaaaattattcttttcaaagcttttctctcttctaaattaaatccgaacataagactgataccacaaaagcaaagaacatttatcagtatcggcaggatacaataatacgcagtatattcgtaggaattataaataatatttatcaaatatgaacaaaaacacatgcagaagaaagtataaaaaaacggcacaaaaaccttttttacataatgttctaaatcaaaacgccctatccttttcgctatataaagaataatgaaaaaatttataaattcaactatcgccattataataaatacactatatagtggtaaagatgtatatttcagaacaatataagataaagggagtgcagcacctaatacaataaattccgttatctggtaaactttcaacttgccaataatcatataaaatatatctatcggttcgtgaaaagagcgaatggcaagatagattaatatagtccgtacaaaagcaatcgtatgctcaggaacggtagtcagccaaatagatagaatatcttctatgtaaaaatatacaggaaaagctatagacaaataaaagaaaacaaccactcgagctccgacaaataacattttgaaaaagctattgaattcaccctttgcatagagttgtgtagcctgcggctgaattgccaacatcacgttgtataacaacgtggttattgcattctttatttgatatgcgatagttcgggcagcattcaccacaactccaccgaaaaggttcagtacaatattaagtccctcgttaacatatgaataggcaaaacttcctgcaaaattccatccggcaaaacttcccatttctttgaacagactcttattccaataaaatttatatttgcactcttcgaaatttactttacaatagatagagcacaacagcctcatcagtaaagacactgccaatatcagcattgagtataactgtaacttatccattgcaaagaaaggaagaataagaatggctcccaacctcagaaaggcattcaatatagatataaaggcatagaacgacatacgttcatgagctattatcacagcatcaaaaggtatagtcatgattgaaaccatagatgccaatatcgagaggtgaaaaacccaatgggcggataccatgcgggcggaatctatcacaagtttattattcaggaaccataacccgataccctctgctattatacaaaaaactaaacttataatgacattgatgagtatgctcatattaaagactttctgtagagcccctatattgtcattacccatttcgtaattaagaaacctttgggtagcagtagcaaacaagccacgcaaagaagaaaatatggcaacaacccctcctaccaatccataaataccaaaatctgtaacgcctaactccttcaataaaacccgagaactatagaatgatattaacatcaataccaacattctaaagcatagaaagattgtatttacagctattttctttgtcttatccatataaaacaatgcttataacctttatattattgaggaaattgcatttatatattatttatgaaacattacaagttacccgtttatttttaactcttgacagtttgagaagatccaaacacattaaaaataatgtaaagttcaagatgtaataattaggaaattctttaatgatacctcatacatcattgccacctcatttgtcatctgcttttccatgttacgatcttcacatggtttgatactactaataatttacttattatcaattaaatgagcactaaaagatggagatttctgaaattggattttccctttatcttgatgaaaaaatctcagaatttcttcccgaacgcaatattcataaacgtcataaaaagtatcttggtatcaaaaccccaggagcgatgttccaaatagaacaaatcataacgcagacgacggatcattttctccaaagtatcagtatagccattgtaaagtgtagcatacgaagtgactcccggacgaatctggaataaataacgataacggggatccacctccataatctggtctataaagaacttacgttcgggacggggtccgataaaggccatatcaccacagaatacattccaaagctggggaagttcgtccagatgatggtcgcgaagaaacctgccgactttcgtcatgcggggatcttttgcaccggcgtagagagcagggccatacttctctgcgtccagcttcatgctgcgaaacttatagatattaaaaggacggccgaacctaccgatacgctcctgcttgaaaatagcaggaccgccatcttcacttttcacggcaatataacaaatcaaaaataaaggagaaaaaacaataagcgcaccaagggcaagaaaacaatcacctatacgtttcacattgcgctcgaaagcattcattccgtcaggaataaaatgatcatctttctcaattggttccataaaataaaaagtcttagtttagatagttgaatagtttaggttggtgaatgaagttattctatcacttcataagggtattggttttcttcaaaactctttagctcttctattatatccacttgctccaaagttaattctgccttatcccaagtggcaataatgctatgagcttgccttgacagttcttcatcataaacttcgctataacaatagacaagaagttgaactttgagcaaagatgcagacagtttaggaagaacttcccaactacggtccaatactcgctgaatgtattgctgcttatgaccattatcgtaaatagtagcggcaaaagctgctaaaagaccaagacaaagctcagcttcggactcaacagtcttgccgcgagtgccataaagctccaatgcctgctcgtaaacttcacggttcaaacgtgtaaattcgtctacatagataggactcccgtcaagcccgtaagtgagaagacgatgggctaaggaaaataatgaatccattaatttgtgaattatgatttgtgaattataatgctttaaaaaaaggttactcttttatgggttctaccaaagaaggcggaataaaggtagtagctacagccatgacaccctctatattaaccaccacacgacggtcgtggcggattcggacaaactcaccgattactccctcaaaaacaccaccggtaatacgtactttctgtcccttaaccaaatgcaattcggccggctctacataaagaaccgcttcgtcacaattgcctgccaccaaaataaagctacgcatttgcgattcgggaattacaaccggacgacaatgctcacgattcataataaaacgtataggcatggacgattcaagtctgtctttcaaagtatctatacgtttacgggtagagtaaacaaaaacaagattgtgaatagccggaagcagtttacggacgcgcttccccgatttcatgatatactcataacgcatcgggatgaaattctcaatattctcggcatccagaattgcttttaacgctaattcacggctataagaaacacgaatcgcaaaccaacaattacctccttcattttcagccggtaattgcatatcgggtttacattgtaactcggatgatttatttactgataaacgggacattaatctgtgataatgcaagatttggaataacatgaagccttgtgaaaagggtgttctttagggacaccggagtagcgtaatacttaccgatcaagtcatgtaatgcagttatttccaatagtttagttagcattcatattgttttagaacttcctaccatcacggaaaaagaagtagaaaaacagttatgttagtttttagcttataaaaagctgagaactaataatctaaaaagagaaagtatcttttagacgttcgtttaaaagacactctttttcatgagaagttcaatagacgtatttatataaataataaagtaataatgaggtcttttgaagcgtggataataaattgatttaaagtaatttgtctaaaaaatagtttctgcgtggaaatattcttattaaacattttgcccgttaaaaaaataggttgtatctttgcgcacaataaacgaacgttaaaaaaacattttcccttttttggtatagtatattaacgactatcacattacctcttcatacacctctaccaaaggaaatacatagcgtgatttgttggtgtatatcaccgataaaaatgattttcagaattaattgttttttcatcattaatcattataaagcactactgtcccgtaaaagtggataaatagttctttgaaattattgaaatatagtcaattacacggttttttgaaatgaaacggacttgattttgcaactttgcagtctaatacaaatggctgctatgttccaagacaaatacgtattctctcaattaaccgcttttctgaacaggactcagttcaacaactatgttcgcaagtatgatggcaacagatatgtgaaacatttcacttgctggaatcagatgctcgcgatgatgtttggacaactgagtaaccgtgagagcctgcgagacttagtcgttgctttcgaggcgcatagggccaagcaatatcatcttggtttaggtcgtgaaccgatagccaagacaactcttgcgacagcgaaccagaaccgtgattacagaatcttcgaagactttgcattctatatgatgaaggaagcctgcgagaagcggacgaccaacatccttgacatttccggaaagaaatatgcgtttgattcaacaacgattccgttgtgtcttgcaacattcccatgggcaaagttccgaagcaagaaaggaggggtgaaagctcatgtcttatacgacattgaagcacaagttcctgccttctatactgtaactactgcatcaaagcatgattccacagcaatgtcttcaatccattatgaaccaaatgcttattatatattcgacagggcttatgactcctttaaagaactctataggatacatcttacagactctttctttgttgtcagagccaagacgaacttaaagtataagacagtcagatggaagcgaagaatgccaaagaacataatgacagatgcggaagtgaaactgaccggatatctctccgagaaaaaatatcctgagtcattcagactcgtccgatattacgacgaagaggatgaccgtgagttcacttttttgacgaatgcaaaacaactttctgcactggatgtcgccgatctttataagaaaagatggttaatcgagctgttcttcaaatggctcaagcagcatctcaagataaagaaattctggggcacaacagagaacgctgttcgcatacaaatcagtgtggctattatcacgtactgtcttgtggctattgtccaacatgatatgaagttgaaacgttcaacctatgaagttttacaaattctcagcatatcattgactgacaaaacccacttgcgtgacctgttcgacaagactaatttcaatgatgtcaaagatctaaatgatcccctgattccggggctttttgattaattgtttaactcgtcccattttaacgggacactaatgattataaagcataaaactaagaaaatgatgaaaaaagtcataacggaagaaagaagtttcgaaaagatgtttccgctacccgcccgggacatgccaacaataagcaaacgcacaattatggcaaacctatatccaccttactacaaatgagaattataaattccaaagaaatcaatgctatttcgcagttatccggctataaaaaattaaatggttgcacatagttaaagaatacacaccacatgctgtagtgaaatcgtagccaaaaggaaacatcctattacggcatttgccaaagagaagaaaaagacagaagtttaatatctggaaattaaaagaacatatcaaaaaaaagaagttaacaccattggctacatgatgttaacttcattacagtaataatatcaactcttacacgtaagtctcaagcagtttcacccgctggccttccggtacgattgttacttcctgaacagcagcaggcaaaagaaccgtttcgccggcacgcaaggtaatctcattctgattgtcatccgtcagacggcaagaaccttccacacagataaaaataacaaaagaatccagttccgaataatcacaagtaatctcttccgtcatgtcatatacagaagtagtgaaataaggactcgctaccatctcaacgggttcattctgtacacgttcgtattcggtacggaaatcgtcttgcacatcggaaaagttaatggcatccattgcctgactggtatgcaattcgcgggatttaccgtccttatccttacgattgtagtcgaaaatacgataagttatgtcggaagtctgttgaatttccgcaacgaatgctccggcgccaatgccatgtacacggccagcagggacgtaaaacacatctcccggctctatggcacaagtttgaagcacttcggcaaatgttccattgtgcacccggtctttatattccttcggagttatctcctcggcaaagccggaaatcaattttgcacctttatcggcagcaatgacataccacatctcatttttaccgaaactgttatggcgtttctttgcaagttcgtcacccggatgcacctgaatggacaaatccagctttgcatcaataaactttatcagtagcgggaatttatttccaaaccgtgcatagttcgcttcacccaccaactcttctttatatttacgaaccatttcgggtaaagtataccctttgtccgcaccattggcaactacagattcactaccttctactgctgaaacttcccaactctcacctacattcggcagagtttcattcaagtgtttgaatgggataatcttgtcgccaccccaaagtgtctgtttcaggatgggctcaaattttagaggatacatttgttgtttttaattagtacaattcaatactgttacaatactttttagattaacgcgacaaacatacaaaaaatatcaatttgtattctaattgtcaaacgctaaactttcataaaatgttccccatatttcctctcaattacttgggggaacaaaagaatttctctttatttgcaagaaaatttaaataataccatgaatatgacagacactactccgacagaaagtaacttgtccggtttggacagaaaagactttcaaaagaatataaacagcaggaaaacagatttatatatcctcaaaaatgctcagggcatggaagtggcggtaaccaactacggttgtgcaattctttcgattatggtgcccgacaaaaacggaaaatttgccaatgtcattttaggacatgacagcatagaacacgtaataaacagtcccgaacctttcttgagcaccacgataggccgttatggaaaccgaattgccaatgggaaattcactttatatggcgaggaacaccaattgactgtcaacaacggtcccaattcactgcacggcggaccaaccggtttccatgcccgcgtatgggatgcggttcagcccaatgaatcgaccgtcattttcaattatacgtctgccgacggtgaggagggcttccccggtactttagaagtagaaatgacatatcgtctggaagatgaagcaaatgccttggttatagaataccgggccacaaccgataaagctacagttgtaaatttaaccaatcacggtttctttaatctcgctggtatttccaacccctcacctactgttctgaataatatccttaccatcaacgccgatttctatgtacctattgatgaggtatctattcctacgggagaaatcctgaaagtagaaaatacacctatggatttccgtactccccatgccatcggcgagcgtattgacgataaattccagcaactggtaaacggagccggatatgaccattgctatgtattgaataaagcggaaagcggtgaactgagccttgccgccacttgtacagaacccgtaagcgggcgcacaatggaagtatatactacagaaaacggcctgcaactttatacgggaaactggctgggaggattcaccggtgctcacggggcaacattccccgcaagaagcgctgtatgctttgaagcacaatgcttccccgatactcccaataaggcacatttcccatcggcagtattgctccccggagatgaatatcagcagataaccatctataagttcggtgtacaagaataaaagaaataactaacctgattataaacttaataaacaattattaaccatgacacaacaaaaacagaatgggaatatcgttgccattattgtgatgattttcttatttggtatgatttcattcgtaaccaatttagcctcaccaatgggtgatatcctgaaatttcaattcggagtacctaattggatgggaactctcggcgtatttgccaacttcatcgcatatgcagtaatgggatatccggcaggtaatatgttgcaaaaaatgggatataaaaagactgcactcattgccattacagtaggatttatcggtgtgggtatccaaacgctttcaggagtagcgggcagtttcggcatttatctgttgggagcattcattgccggtttttccatgtgtttacttaatacggtagtaaacccgatgctcaacacacttggcggtggcggtaacaaaggtaaccagcttatccagctcggcggttcgttcaattcattggcaggaacctccgttatcattcttacgggtattttaataccttccattaccaatgcaaaaatcagtgatgtgttcccattgatgtatgcggctctggctatttttgcattcgcattcattgtcatcttcttctccactattccggaaaaagaaaagcaggaagttaaaatcgacaccactccttctcagtatggtcctttatcattccgtcatttcatcttcggagcaatcggtatctttgtatatgtaggtattgaagtcggtgtacccaatgttctgaacaaatggttacaaaatcccgacttggatgtactgggtgtaaatggagcaggagcagaagctatcgccggttcagtaacagcaacctattggttactgatgttggtgggtcgtctcatcggcgccagtatcggcagtaaaatatcagcaaaagccatgttgggcacagcttccgttataggtatattcctggttatctctgccatgtttgcaccaaccgatctcatggtaaacatgccggtattcaagaacagtgccgaagaaatgttcggacttgtcaatgtacctgtcaacgctatgttcttggcgttagtcggactctgtacatccatcatgtggggcggtatctttaaccttgcagtagaaggactgggcaagtacacggaaaaggcttccggtattttcatggtacttgtatgcggtggcggtattctgccgctgttgcaaaatgccattgtcgactggaatgacggaatcggctatttaacaagctactggctgattgtagtggctcttgcctacctgctttattatgcgctgataggttgcaagaatgtaaataaagacattaaagttgattgataatacatattataggtaattagatttattcaccttaaaaaacaatatcatggatatagaatacgtaagaagccgtttcatcaagcattttgacggaacaacaggagcagtctatgcttctccgggacgcattaatctaatcggtgagcacaccgactacaacggtggttttgtattccccggcgcaattgacaaaggtatgattgcggaaataaaaccgaatggcacaaatacagtaaaggcctattccattgacttgaaagactacgtagagttcggtttaaatgaagaagacgctccccgcgccagttgggcaagatatattttcggtgtatgccgcgaaatgattaaacgcggtgtagaagtaaaaggattcaataccgcttttgcaggcgatgtgcctctgggtgcaggaatgtcctcttccgcagctttggaaagcacttatgcttatgcgttgaacgatctgttcggcgacaataaaatcgacaaatttgaattggccaaagttggccaggctacggaacacaactattgtggcgtcaactgcggtattatggaccaattcgcttccgtattcggcaagaaaggcagtctcatccgtttggattgccgttcattggaataccagtacttcccgttcgagccgaaaggttaccgtttggtactggtagattctgtggtaaaacacgaacttgcttcgtcggcatacaataaacgtcgccaaagttgcgaggctgctgttgccgctatccagaagaaacatccgcatgtagaattcctgcgcgactgcaacatggaaatgcttgaagaagccaaagccgaaatcagtgcagaagactttatgcgtgcagaatatgtgattgaagaaatccaacgcgtactcgatgtttgcgatgctttggagaaaggcgattacgaaacggtaggccaaaagatgtacgaaacacaccagggcatgagcaaactgtatgaagtaagctgcgaagaactcgacttcctgaacgaccttgcttttgattgcggtgtaaccggttcgcgcgtaatgggcggaggatttggcggttgtaccatcaacctcgttaaagaagagctttatagtactttcgttgaaagagccaaagaagaattcaagaagaaattcaacagaagtccgaagatttacgatgttgtaatcagcgacggtgcacgcagattagaataaaaacaattcgatttataataaaaaagacgctttctgtgaagaaggcgtcttttttattaaaccgaccttcctgtcatctataccggacaaactcctcggcagccggtattgttccatttccggcagagaaataaataactcccaacaacgacaacacacctcgtttaccttccggcagacaatcctaaacccaccagtcagcagtgaacagttattgtattcaaaacaggaagcaggttatacaggcaagaaaaaagagcagctttctatattgtaaattgcacataaagagttatctttgtcctggtaaaacaacaagcaagaattcaattcacttacagaatattcaaataacaattatattttataatatgaacgacaagaaacttatgaaccttgcagcggacaacatccgtatccttgctgcttctatggtcgaaaaagccaattccggacaccccggtggcgctatgggcggtgccgactttgtgaatgtactcttctccgagttcttagtgtacgaccccgagaaccccgcgtgggaaggtcgcgaccgtttcttcctcgacccgggacacatgtcgccgatgctctattccacattggcgttggcaggcaaattcacattggatgagctgaaagagttccgccaatggggcagccccactccgggacaccccgaacgcgacattatgcgcggcatcgaaaacacttccggtccgttgggacaaggacatacctttgccgttggagcagccatcgccgccaagttcatgaaagcccgttttgaagaagtaatgaaccagacgatttacgcctatatctccgacgggggcattcaggaagaaatctcacagggtgcaggccgtattgccggtgcgctgggactggacaacctcatcatgttctatgatgcaaacgacatccagctttccaccgaaacgaaagatgtaaccatcgaagatacagcaaagaaatacgaggcatggggctggaaagtcatcacaatcgacggtaacgatgcagatgccatccgcggcgcactcaacgaggctaaagccgaagctgagcgtcctacgctgattatcggtcacaccgtaatgggcaaaggcgcacgcaaggcagacggcagcagctacgaagccaactgcgctacacacggtgctcctttgggcggcgacgcttatgtaaatacaatcaagaacctgggcggtaacccggaaaatccgttcactgtcttcccggaagtagccgagctttacgccagacgcgctgccgaattgaagggcatcatggcagaaaaatatgccgccaaagccgcatgggcaaaagccagtcccgaaaaggcagccaaactggaactgttcttctccggcaaggctcccgaagtggactgggctgcaatcgaacagaaagccaatgtcgctacacgtgccgcatcggctaccgtactcggtgctctcgccactcaggtggaaaacatgattgtggcttccgccgacttgtccaactccgacaagaccgacggcttcctgaaaaagacccactccttcaagaaaggcgatttcagcggtgcattcttccaggcaggcgtatcggaactgacaatggcatgctgctgcatcggtatggcgctgcatggcggcgttatccccgcttgcggaacattcttcgtattctccgactacatgaaaccagccgtacgtatggctgccctcatggaaactcccgtaaaattcatctggacacacgacgcattccgcgtaggcgaagacggtcctacgcacgaaccggtggaacaggaagctcaaatccgcttaatggaaaagctgaaaaaccacaaggggcataattccatgctggtactccgtcctgccgatgcggaagaaacaaccgtggcatggaaacttgccatggagaacatgtctaccccgaccgctttgatattctcccgtcagaacatcaccaacctgcctgcaggcaacgattacagccaggcagccaaaggcgcttatatcgtagccggttcggacgagaatccggacgttatccttgtagcttccggttccgaagtagccacgctggtggccggtgcagaactgctgcgcaaggacggtgtcaagctgcgcatcgtatctgttccgtccgaaggactgttccgcagtcaggctccgggctatcaggagagcgtgattccggcaaatgcaaaagtattcggtctgaccgccggcctgcccgttacgctggaaggcttggtaggcgcccacggtaaggtttggggattggaatcgttcggtttctccgctccttacaaagtgctggacgaaaagctgggcttcacggcagaaaacgtgtacaagcaagtaaaggcaatgatttaataaaacaacagtaaaataatgatagagtaatgaggcgataaggtagaaaagcctgcacatgctgcactacatcgtcacctcattgctctatcgctttttcacattatcactctatcattttattttatatgaaaactattggactttgttccgaccacgccggctttgaactgaaagagtatgtccgcggttggctggaagccaaaggctggccttacaaagattacggaacctactccaccgaaagctgcgactatcccgactttgcccatcaactggcgcaagctgtcgaggcaggcgaatgttacccgggaattgctatctgcggcagcggaaacggcatcaacatgacgctcaacaagcatcagggcattcgtgcggctctttgctggactgccgaaattgctcatctggcacgccagcacaacgatgccaacatccttgtcatgccgggacgcttcatcggcacggaagaagcggatatgattatgaccgaattcttcaacacttcgtttgagggcggacgccaccagcggagaatagacaaaataccggtacagggataaccctctgattcaaggaagcccttaaccggttgttttcattccgtgagacggaattattcgccctgcgagataaagaaaatcatcccgcgagacgatttatttcatctcacgggataatttttttcgtcttacggaacggatttttcttcatctcagtcaattattacaccctttcaatcaaaaactaacctctgtcaccggaagagttttcctacttttgcctgcgtaatctatttaccatttaagaacataaaagaaaaacgcatgaagaaagtaatcggaatcatctccctgcttctatcggtaaccctggccaccgccaatccgatagactttgacaaagccttcaaggaaagcgccaaaattgaaaaacaaatcaagcggacctctttccccaaacgtacctacctcatcacagacttcggtgcacaaccggatacgccggatgaaccttgccatgaggctatcaaccgggccatcctgacatgcagcctgaacggcggcggaacggtcgtaatacctaaagggactttccataccggccccatcaccctaaagagcaacgtaaattttcatgtggaagaaggagccgtactgaaattctccaccgaccagagcctttacttccctgccgtcatcacccgttgggaaggtctggactgctacaatgcccgcccgctgatatatgcatacggcgaaaccaacatcgccatcaccggcaaagggacaatcgacggtcagggttccaacgaaacctggtggccgatgtgcggcgcttcgcgctacggctggaaagaaggcatggtggcccaacgcaacggcggacgcgaacgtctgctgatgtacggggaaacatccacgccggtatacaagcgtatcatgaaacccgaagacggcatgcgcccgcagctcatcaacctctattcctgcaacacggtactgatagaggatgtaaccctgctgaactctccgttctgggttatacacccgttgttttgcgaaagcctcatcgtacgtggcgtgcacgtattcaaccgtggtcccaacggagacggctgcgacccggaatcctgcaaaaacgtactgatagagaactgtaccttcgatacgggcgacgactgcatagccatcaaatccggccgtaaccaggacggacgcaagtggaacattcccagcgaaaatatcatcgtgcgcggctgcttcatgaaaaacggtcatggcggcgtcgttatcggcagtgaaatatccggcggctaccgtaacctgttcgttgagaactgccgcatggacagccccgacctggaccgcgtaatccgcatcaagaccagtacctgccgcggcggactgatagagaatgtatttgtacgcaacgtcaccgtcggccaatgccgcgaagccgtactgcgcatcaacctgcaatacgaaaaccgggaaaagtgcaatcgcggctatgcccctaccgtgcgcaacgtacatctcaaaaacgtgacttgcgagaagagcaaactcggtgtactcatcatcggacttgatgatgacaagcacgtttataatgtaagcgtggaagacagccgcttcaataacgtcaaggaaggtaaaaaccggattagcggagcaaaagatgtcacgttcaagaatctgtacataaacggggaacttgtgaaataaccggtctcccccgacaatccctgctaaaataaaagaccgaagaagtatattccatctgcacattcatcaggagaacatccctttgtcctgctttgcatcgtaatgaatcaaagccggaacaaagggattgtcatatctcccaatcccccggcatttgctcccgaaacgcccggagtttactcctgaaagaccgggcattccaatagaaaacacccggaatatgggaagcaaatgccgggagtttcggaagcaaatgcccggaataagaaaagacaagatacaaccgtctccttattttcttatttttcacagtaaagatgcctctcatcttcaaataaaaactatctttgtatttaaataatccggaactcagaacgatatggagcaattaaacaccataaaagagcttatcagtcagggaaacgtagagcaggccattctgttgcttgacgaactgcttcagaccgatttcccgcaaaaagacgaagcctattatctccgggggaacgcataccgcaaacagagcaactggcagcaagcgctgaacaactaccgctatgccatcgacctcaatccggacagccccgcccggcaagcctataacatggtaatggatattctgaacttctatcacaaggatatgtacaatcaataaaaaacgtaaattatggcaaaaatcaaaggagcaatcgtagtagacaccgagcgttgcaaaggctgcaacctgtgtgttgtggcttgtccgctcaatgtaatagccctcaccaaagaggtgaacgtgaaagggtataactatgcccaccagatattggaagatacctgtaacggatgcagttcatgcgcaactgtatgtccggacggatgtatctcggtttataaagtaaaagttgaataaataagaagaatatggcagaagaagttgtattaatgaaaggaaacgaagccatcgcccatgcagccatccgctgcggcgccgacggatacttcggttaccctattaccccccaatcagaggtattggaaacactcgccgaactgaaaccgtgggaaaccaccggtatggtagtgcttcaggcagagagtgaagtggcagctatcaatatggtatacggtggcgccggaagcggaaaaatggtaatgacctcttcatccagccccggtgtcagcctcaagcaggaaggtatctcctacattgcaggagccgaattgccgtgtctgattgtaaatgtaatgcgcggcggtcccggactgggaaccatccagccaagccaggccgactatttccagaccgtgaaaggcggcggccatggcgactatcgccttatcgcccttgcccccgcttccgtacaggaaatggcggacttcgtaagcctgggcttcgagcttgccttcaagtaccgcaatccggctatcattcttgccgacggcgtaatcggacagatgatggagaaggtagttcttcccgcacagaagccgcgccgcacggatgccgaagttatcgagcaatgtccgtgggccactactggcagaaccaacggccgcaagcccaacgtcatcacttctctggaactgaaaccggaagagatggagaagaacaacatccgcttccaggccaaatacaaagaaatcgaagagaacgaggtacgctttgaagagattcactgcgaggatgccgaatacctgattgtagctttcggctccatggcgcgtatcggccagaaagccatggaaatggcgcgtgaagaaggcctcaaggtcggaatgcttcgccccatcactctgtggccgttcccaaccaaagccattgccgcatatgccgacaaggtaaaaggcatactggttaccgagctgaatgccggacagatgattgaggatgtccgcctcgccgtaaacggtaaggtgaaagtagagcacttcggacgtctcggcggcatcgttcccgacccggacgagattgtagaggcgcttgccaaattaaaaatcgagggttgagaatcaagaagtctcagccaactctatttttattttttatttttaatcctcaactctcaaattaagaaatgaatcctgacaaaataagaaacgtactgaatattctctttctgatacttgccttggcatctatcatcgtgtacattgtagcaagggacgatttcaaactgtttatatacgtttgcggcgcagctatatttgtaaagcttatggagtttttcatacggttcaccaacagataaggagaagtgattatgacaaaagaagatattatcaaacccgaaaacctggttgccaagaaaccgactctgatgaacgataatcccatgcactactgcccgggatgcagccacggcgtggttcacaaactgattgccgaagtaatcgaagaaatgggactggaagataaggccatcggaatctcccccgtgggatgtgccgtgtttatctacaactatatagacatcgactggcaggaagccgcccacggacgtgctccagcccttgccaccgccattaagcgcctgtggccggaccgtctggtattcacctatcagggcgacggcgacctggcatgtatcggtacggccgaaaccatccatgcgctgaaccgcggtgagaacatcaccatcatcttcatcaacaacgccatctacggtatgaccggcggacagatggcccccactacccttgtgggcatgaaaacctctaccagtccttacggacgtgacgtacacctgcacggttatccgctgaaaatggccgatatagccgcccaactggaaggtacggcatacgtaacccgccagagcgtagatacggttcccgctatccgcaaggcaaagaaagccatccgcaaggcgttcgagaactccatggcaggcaagggttccaacctcgtggaaatcgtttccacctgcaactccggctggaagatgtctccggagaaatcaaacaaatggatgcaggagcacatgttccccttctatccattgggtgacttgaaagataaacaatgatgctaaaaacagaagaacaatgaaagaagaaatcattatagcaggcttcggcggacaaggcgtattgtccatgggaaagattctggcatattccggactgatggaaggcaaggaagttacctggatgccggcctacggaccggaacagcgtggcggtacggcaaacgttaccgtaatcgtgagcaacgagaaaatctcctcgcccatcctgagcaagtatgatgcggctatcatcctgaaccaaccttcattggagaagttcgagagcaaagtaaagccgggcggcatacttatctacgacggctacggcatcatcaacccgcctacccgtaaggatatacacatttaccgcatcgacgccatggatgcagccaatgaaatgaacaacgcaaaggctttcaatatgattgtgcttggcggactgctgaagattgctcccatcgtaacgctggagaacgttatcaagggattgaaaaagacactccccgaacgtcaccaccacttgatacccatgaatgaagaggctatcaaacgcggtatggagctgattaaagaggtctgaaaaaacagaccgtccgtttgaggtaaacagatggtctgtcagccccgaacggacgatgcgttcagtataaacggatgatgtatttcaaagcgatacatcatccgtttttcattgccctcatatcaccaatggtcaggcatatcggaatagtctgtcagttttgtgcaatctccgaagcaacgtacatattcttgcagtgcaacgaactcggtcgagtagtctccgcgttcatacaagtgtacctttttattgcctatattattatcaattgtaaggacaaactcccgtatcgcgcatcttgcatctggagtttgtaatcttgcatatcccccttccgttgattacatcatcggtcagattttcacaagtcactttatacttgcctttccctcccgaattgccggtagcggaaaggactatataaagaatgagcagcgcaactgccacgaatatcagaatccaggtgatagtgaacaccgcataggtagtcaataccatatatccacaccgccatgcaatctgttttctgccttcgggtgcggcactgtgtatctgataccaggcataaccgatgagggcaagcacggatatgcccaccagccagccgattaccgcctcaccgtccgaaccccagaactgcgacagtacggcaaccacacccagcacagcacctatccagtaatagctattcgactccggcacaacgtccactccggacatctcacggagatgcttggggacgaaaccgttccatttcgtaaaagacaagattaccgccacaaaagacaagatgacaagcaacagcaaaccgccgaacaaacctgccaggtttaccgctacgtcgtagaacagtcgccacctttccgctctcctgttttccgcacgactgcaacgcacgatacggcgtatcacgcgccaaaccggatacaccagcgtcaacgctacaaacgtacctgcaaaccaatacatctgtgtatccgtaggcgtcttatctataaaaagccccacgctgcaaagcagacccaccatcatcattacaaaccccagcaccccggttacaatcaatgtgcggagagaacggaagctgaatgaggatacaatctccgtacctgccttcttattgaaccaaccttttactttaccgaacctcaaaaacaaaagacatgagaaaacaaagccgaacagacccaatatttgagaaagcaaagccaataatacgattatagtttccataataccttgtctattatcattcgtaataagtaatgctacgttccgcaatgccatagggctgtccgttaagggttatcaccatgcgtgtccagttgccccggtcgtccgtttccggataatcgtaagacaccttattatcatcggaagatacgcaggtttccagccagcctttttcgttataggtatactcctttacggtgagataatcgtccatctcgctgtaagcggactctttcagcacacgccccaaagcatctttcacaacataatcgcgttccgtatcaccatgctctatgcaattgccatccacgtactctgtctttgaagcatccaccggatactcactggtagtcttgtcgccgccgatatacatgtcttcgattgtacttgccagcttgccgtcccgataaacatatctgcggtcggttagcagttcaccgttctgaaagagtttctcattgctgacattcccgtcccgataggcatagaccgtaatgtatttgacggcgtccaccacactcaccacagaatcgagctgcccggcagcattataaatccgggtatcttctttcggaaagaaatccgtttcacgataagaatccggtttgccgtcctttactgtttcattgccctgggacttcgcgttgtaaatcaaggtttgcaccttatgcactttaccgttcagtccttctttgtccgtcccattgccgttttgtgtggatacgccaccacaggctgccagcacaataagtgccgccgccattaaaagcctgttcatagttgtttgcctttaagattaaagaagtttgtttctatcagaagccgtaagcctgcttacgtatagccatataatctttctctgccagaaatacaatcttggcaaattccgtaaagtcgtaggtatggcagttgatgtacaccggagctccttcgctatggcaaggtacgccggcttgaaccatctgtccgggagcatattcggctttcaaagagctgttataagaattaccgttgaaagggttcaactgtccgagttcaatcaaatggtcgttggccttcatcaaggcgaaatacagacgggtatctttcagcggatattcgccttcggcacattgacgtttggtttcacgtactacaatatcccgtttgggagtgaccgtaaccctcacaattatactgcccgcctctctgccggcatgatattccgccaccttagcacccgttatctgaaaatcagggtaaacatctcccgtacagacaatttcacgtccgacaagtttctcgccttcttccgccgccttctgataactcttggcagcatattcatcaaactctttcagtttcttctgataccggtccaaatcatcctccttacgcaagctttcgtccaatgcttttttcttggcagccacctctgcaaatatcgcaggcacacggcccaaaggcgcatcgctacttgcagccgaacccgaagcggctccaccgccgcatgccgacaacacaaccagtccgcagaacattgcagataaagttataaccgtaaactttttcatactattgaattatttaaatgagtaatgttgtcagcatttacggatagggattatccctttggagatagctgtcataatgaggtcggccacattacgtgcatccagcttgtccatcagatgacggcggtgcgtatcaaccgtattggtagagacacaaagttcctgagctatttcctgcgtgttcttgccctcggatatccgtttcagtacatcaagttcgcgcaaggtcagttcctcacgccgcccttcgtccgaacgccgcatctgtgcacgcacatgctcggcataagggcaatagtaagttccgccatccagcacccggcgaatggcttcggctattttcgtagaatcgatggatttaaacaagataccgtctactgcactctgaatcaaatctttgataaaccagatttcttcgtgcatggtgttgacaatgatgcgtgcccgcgggtctttctcccgtatccgcacaatgatgtccatcccggatatgtcgggtagttccatatccagcacgaaaagattgaaacgttgagatgcgataagatgcaatgcctcctgtcccgacgatgcagtacatacgttttttatttccggtagcgaacattctactatccgcttcaaaccttgaagcaccaaatcatggtcatccaccaacaaaatgcgtatatctctttctttcatcaacctatctttgtgttctgaattatgttgcaaagaaatagcatttatcaatatgcggcatcatcaaaaatagtgattttactctccggcataccggttttccattaaatggataacgatatttcaagcttgaacttttggcttctgtcctgaatatccgtggtaaacaaaccaccgacagctttggcgcgttcttgaatggtagtaagcccgatgccctttccccgcacctcgtcaccacagtagtttttaccgttatttgaaatttgcagagtcagcaacttccgtttcaatgtaagagtcacatctatctccgtcgctccggaatgtttcaggatattggacagcaattcctgcatgatgcgataaacttcataagacacctcttcgggcacttggctccattgaatctcttcattttccttactgaacgcaagttgcaccgacgcaggaaaggcaagccctttcacataggcctccaccgtctcggcaagggtagtaacctggaacttaggcggcatcagttcgtgagaaatacagcgtacatcgctgcgcacctgctccaatagagccagaatctcccgtttcgattcgtccgtaggctgcatgtactgcatattcataccgataccaagcaggtcgttgcacacaccgtcgtgcaaatccttggcaaggcgcgtacgttcgcgctccaaaccgtctatatagctttgggcaagtttcaattcctcctctttcctgatgcgcttacgccggaagacataataggcagccagcagcaggaaagcagaagaagccgccactgccgccacactccattgcatcgtcttagctttctgttccaaatgctgctgagtgagccgcgctatctcaagttccttttcctggttctcgtatttaatggagagttccgacaattccgtctccacctctgctttatgcaggctgtctgccgtatgataggcctttgcgtaatactccatagcctccggataatttttcattccggcatagttgcgtgccattctctcaaaaagccggtctacgggagtctgcgaactgctgtccctcgcagccagcatccgtttctggatatgcaggctctcgccatagcgtcccattttagtcagtatgtcacacagactttcatgatacccctgcacctcggcattggtagcgggcagtcctgccgccactttatcgccttccgccatgtaatgattgatggagtcgcgattgtccaacctgtaataggcactcaacagatacgctatgattttcagtacgaatctcggcttctgctgctcccgtgctttggcaagtacgggataaagcagttgggcagcttccgcataattttccctcagcgtgaaaatacttcccgccgtagcggcagcatacatcaccatgtccatgtcatcactcttctccgatgcctccaacgctttccggatgtaatattcgccttctttcagccgggcggtgttcgtatagaaaatggctatactcgtcagcaactgtgtccgttcatcataagcctcgcgattatcaagcaacgccaatgcccggttatagcacaccagcgccgaatcgggcatctcctttctacgatatatcacgccgacagaggaaagcacggaagctatctcgacctcgtcccaatgcaaacgtccggcttcttcgagcacaaaacggaaacgctttaacgattcgtccaactgccccgaagaaaaataagcgtctgccagattattcagcaggtaaaggtaaggctcggctttatccgttgcggcatatttcaatccctgttcgcaataataccgggtactgtccgcctggcgataggcgtagtattctcccaaatgacaataagctgcggcaatactgtcgcggttcttctggctcatgccgcgtgccagctcttcccggtaagcctgcaactccgcatcttgagcatataaacaaggataaattacaaacatccccaaaaggacaaacaatgttttcatgttataagatatggattttaagtatatataaacagtctttgacacctactcaccacaaaggtaacaattcatcataatatctgcgcaaatataaataacccggcacatacaatactccatttacaagaaaaaacattctttccatctcatttttatcgtcaaaaagaaagagattgcctgtaaacgccgaatgtaaaaaagaagcaaaaaaggctgaattccgtaagcgaataattttttattgtatctttgcgcctaattatgagacgaatcgtactgacatacatatttctatctattataggcatcttgggcgtcggggcacaaaaccctttcaaccgtatggatcctgtaacaggccgtgaccagttcggcaaccaggtagaccccaacacactacccgataatctggaagacagcaccgatacggaaatccaaagccttccgcccaaactctatatgtggcgtttgagtgaaacattgggcaaccgcactattatccccgccgatactgccaacctgaacttccagaataccaatctggtagaaggcatgtacggacactataattatctgggtaatctgggttccccccgtatgtcacgtatcttctttgaacgcagagacaacgagccgaccatcttcatggagcctttctccagcttctttgtccgccccgatgaagtgaaatttaccaacagtaatgtgcctttcaccaatcttacctactataaagcaggaaataaggtcaacggtgaagaacgcttcaagtcctatttctcggtaaacgtcaacaagcggctggcgttcggcttcaacattgactatctgtacggacggggatactaccagaaccagtccacatcgaacttcaatgccggaatattcgccagctatataggtaataaataccagatgcaggcggtgtacaacaacttcactatgaagatgaacgaaaacggcggtattcaggatgaccgttacatcacgcgcccggaagatatggcggaaggcaagaaagaatacgaatccaccaccattccggttaagttggaacagacgtcaaacaagaacaaagatttctatgtatacctgacgcaccgttaccgcctcggcttcacacgtgaaaccacaactgtggaagatgccaaatcccccaaaagagcagttgccaacgacagcgtacctttagccaaagataccattataaccgaagagttcgttcccgtcaccagcttcatacataccatgaaagtggaacgggcgcgtcataaattctcttccgccaaggagacggaagggcaatatcccaacgcttacttcaacgaagtagccagcagggactctactacggctttcagtgtaaagaacgtattcggcatcgctttgctcgaaggtttcaacaagtatgccaaagctggactgacagcctatatatcgcataaattcagccgctatgagttgatggacacattgtcgcgaaccaatttcgacgaacaggagatattcgttggcggcgaactggccaaacggctgggtaaaacactgcattacaacgtaaacggtgaagtgggcatcatggacaaggcactcggacagttccgcgtcaatgccgacctcgacttgaacttccgcctctggaaggataccgtgaacttctatgcacgaggttatgtaagcaacacgctgccctctttctatatgcgtcattatcactccaaccattactactgggacaatgaaaacatggacaaggagttccgtacacgcgtggaaggcgagctgaacatcagccgctggaaaaccaatctgcgtgccggcgtagagaacataaagaactacacctatttcaaccaaaatgccatgcccgctcaggaaagcggtaatatacaggtgctctccgctacactgaaacaggatttccgcttaggcatcctgcatttggacaacgaagtaacctggcagaaatcaagcaatgaaacggtattgcccttgccgcagctctcgctatatcacaatctgtatctgcttgccaaaatagccaagaaagtgctgactgtacaacttggtgcggatgtgcggtattttaccaaatacaatgcacctgcctatactcctgccattcagcagttccatcttcaagcagcagatgaccaggtggagattggcggctatccgattgtaaacgtatacgccaatctgcatttgaagcggacacgcatctttgccatgatgtatcacgttaatgcaggaatgggtaaaggcaattatttccttgtgccgcactaccctataaacccgcgtctgttcaagattggcatttcatggaatttctacgactaatgccgtctttcaactatgaaaaagagtaaattatcaaaatatatcatcctgggggcaatagccgcagtcgttgccacatttatattgcccaaaaaggaaatccgtaaaggacatccgcgcgattatgccgaaatagcagcagacggtacgctccatgccgctacggaatataactccatcagcttttatgtggacggagacaccctgtccggatttcattacgaattaatagaggcttttgcccgtgatcacggtctgcaggtagccattactcccgaaatgagttttaacgaacgtctggaaggtctggcaaacggcaggttcgatgtcatagcctatggaattttagcaaccagcgaattaaaggactccttgcttctgacctctccgattgttctgaacaggcaagtattggtacaacggaaaacagactctcccgacgattccctgtttatcaaaagccaattggacttagcgggaaagacgctgaatgtggtagaagggtcgccttccatcctgcgcatccgtaatttaggaaacgaaatcggtgataccatatatattaaggaagtagaaaagtatggttccgaacaacttatcgcccttgtagcacatggcgatatcgattatgccgtatgcgaagaaagcatcgctcgcgcagcagccgacagtctgccgcagatagacataaatacggctatcagcttcacccaattctactcatggggagtgagcaagcagtctcctgtactcttggacagcctgaatacctggctgaaaagattcaaaaaaggaaaagagtaccagaaaatatataagagatactactaaaaagttaaacgctgaaagctaaaaggtcgtgtcaaaaagaacctgataatttctttttgacacgaccttttagctttcaatgcttaatcctcaaatcttttcaacttccttcagccacatttctgaagaagcatcgctcggcatccgccagtcaccgcgcggactgatagaaatacttcctaccttagggccatcgggcaaacaggaacgcttgaactgctggttaaagaagcgacggcaaaaagtctgcaaccacttctttatagtctcttcatcataaacatctttaaacgtacgcgcagcaaggaagaaaatcttggaaggacggaaaccgcaacgaagaaaataatataagaaaaaatcatgcagttcgtacggccctacaaggtcttccgtaatctgcctgatatttccgttttcatccgccggtatgagttccggactgataggggtgtccacaatatccaataatgtggcccgcgacgtctcatcgatgtcattctccgccacccacttcaccaaatgtttcaccaatgttttggggatacttccgttaacaccgtacatagacatatggtcgccgttgtatgtagcccagcctaaggcaagttccgagaggtcgccggtgccaactaccatcccccaggtctggttggcaatatccatcaatatctgcgtacgctcacgcgcctgcgaattttcatacaccacatcgtgtacgttgatatcatggtctatatctttgaagtgctggatgcaggcatcctttatgctgacctcgcgcatggttacgcctaatgatgccattaagtccaccgcattggtatgggtgcggtcggtagtaccgaatcccggcatagtcacgccgataattcctttacgattccaacccagtttatcgaatgttttcacacaaaccagcaatgccagtgtggaatccagaccaccggatatgcctaccaccgcactcttggcattggtatgcagcaaacgttgcgccaatcccgacacctgtatggagaatatctcctcacaacgctcgtccaacgctgctccttgaggaacaaacggatgcggatcgaaaacacgggtcagattcaaatctttggaattgacatattccgtagagacacgcaccggcacttccggtgcacaattggcgcgacaggctgcaaatgtagtgttcacccggcgttccgtacgtatatgctccacgtcaatctcactgataacgacctgttcctcgaacgagaaacgctcgctgcctgccagcaacgtaccgttctcgtaaattaatccgttacctgcaaacaccacgtctgtagtagactcgccaaaaccgcatgaactgaatacataccctgcgatacaacgtgccgactgctggctgataagcgaacgcaagtaagcatgcttgcctatcccctcattgtctgccgaaaggttgaaaagaatttccgctccttgcaatgccaaagaagaacttggcggaatcggagcccataagtcctcgcagatttcaattccaaaggttgtatccgccgtctcgaaaagcagattccgccccatggggactatttgcccgcacaaacgggctgtcgtttccgaaacttcacacgcagaagtaaaccagcgcttttcgtaaaactctttataattcggaagataagttttaggaacaactcccaatatcttacctttctgtatgaccaccgcagtattcagcagtacaccgttcaaaggcacgggcataccgagaatggatataatatccatctgacgggtattgttcaaaatctgcatcagccccatttcagcctcttcaagcagaagttgctgggcaaaaaggtcaccacaggtatatccggtaatgcacaactccggaaaggcaattatctgcactcctttcccatcggcaatgattatctctttttcaatctgtccggcattgaacttacagtccgccactctaacacggggtacagatgccgccactttaacatatccgtaattcatatatgaatcctattaatattagggtgcaaaaatacggcaatttatcaataaacacaaaagaatcagccttttcactttgcatagccgcactttctgataaaaaatatctaaaatcttttggataaacaaaagaagtacctatctttgcaagagaattaaaaatgtaattattacaagtttgaattgcagatgatatggatgtagtaaaacgattgcaaaatcataacattaagccctcggtacagcgcatagccattatgacttatctgatggagcatcgtacacatcccacggtggatgaaatttatacggcacttgccccttccattcccacattgtctaaaacaactgtttacaacactttaaaattacttagtgaacaaggtgctgcacagacattgacaattgacgaacggaatacctgctatgatgcagataccactcctcatgcccacttcttatgcaaacattgcggaaaaatatatgatttggaatgcaatgccaacattaaacaggtagaagaaatggatatgaacggacacgaagtgcaagaaatccattattactataaaggtatctgcaaaagctgtctggaaaatgaatatttaaccaaaataacgaataactaattcaactaattaaaatctgaagtaaaatgaaaaagtttagatgtactgtctgcggttacgtatatgaaggagacgcagctcctgagaaatgtcctttgtgtaaagctcctgcaagcaaattcgttgaagtagaagaagcacaggcaggcggtccgttggtttttgctgacgaacatgttattggcgtagccaaaggttgcgatgacgaaatgattaaggatttgaacaaccacttcatgggcgaatgcacggaagtaggtatgtaccttgcaatgagccgccaggcagaccgcgaaggctatcctgaagtagctgaagctttcaagcgttacgcatgggaagaagcagaacacgctgcaaaatttgctgaattgctgggtgactgcgtatgggataccaagactaaccttgaaaagagaatgaatgcagaatcaggcgcttgcgaagacaagaagcgtattgctacacgtgccaaagcattgaatctggatgctatccatgacacagttcatgaaatggctaaagacgaagctcgtcacggtaaaggtttcgaaggtctgtacaaccgctatttcaagaaataatccgaaacaatacggtagaatataaaaaagacttgcagaagaaatttctgcaagtctttttttatcggtaacggggaatcacttccccttaaaaacgtaaacctaaggtcagcagcacctggcttcgggtattttttactttcgtcgcttcaggagagcctatcactaactggcctccatcttcataggcattaatgaacggatagaaatcttccttgtatgaagagaacttatatgccaaatcagcataaaacatagaccctctgtaaccgagacccactgtatagttactcaaagctttggtatttgcaaaatccgtatccgtctgaattgagttataaggcaaatccttatatgcatcactattgaaaatggcagaggtataattgtatcctgcacgcaaagcaaactgaggaatcactttatattcggctcccaaacgaatggtgctcacccctttcatcatagaagtagtactgttttcgtacccaaatgtatcggaatagccttcctggtccttgaatttcatggacgaatagtcctgatattcatactctgcccctaaagccaaactggaacctacagtatatcccaaacttacattatacgtccatggtgtctgcaagtggaattgacgcaccatgtctccattcattatatcataagtatccacagtatattgaccaatcacaccgcttcctatacccgactcgttagctatatccaaatcattcaagacattcgactccagacgggcatttgtcttataatccagattataataggtcggtgtatgaatggctaatccaatcctcaaaggggaatattcgaaaggacgcacgatggctccgaatttcacatcaaaacccgaaccgtgtatcttgttccagctctgcaggttataattctgcccgatgctatttccggcattatccaaatagtcttcactataaaaagtatatttattgtaatctatggcataagctcccacagttacgcctaaatatacccggtcattaatattgaatgaaatattgaaatcatactgttcaattccgccacgctcttcggaccggaaatttccatttcctcctaaaaacattcccccatattcacccggagtgatatacatcaaatcaccatccagattctttacttgagtcccgttttccatatagggaacgtaaccggaagggacatctccctgtccgttgtgagcaataaagtcggttatcagataactgtcatatcccaatgcggatagccatcctacttccggatctgtataaatattgcccgaccagtcctttattcctccggcttgtgccgccatataatccgtttgcgtataatcgcctaaattacctcccatcgacatattcttataaaaagacttcgccttatgataattaaagccgaaattcacataacgtaaagccgtagcattacctatctttgaagaaataacaaaaccggcattatcaaatgaggttttcatcttgtctgcattcatcttacttcccatataattactttcagtaccataagaagaaagactgaatgacagcattgcatcattactgcgataaatacctataccggcagggtttgtagcaatagtggaaatatctccgcccaacgcacccatagccccgcccatacttacaaagcgtgctgtaccatttaaatccttgtttgcgatgttggctgcatcgtacacggtctgtgcacttaccggaactgcacccaacatccccaaaacagctaaagttataatttttttcatatcctactcatctttttctattgaatactatacctatcttcttcttgaagaaccaccacctgacgaacgggtagcaccgccggaataactgcgtgaactgctaccgcctcccgaagaataactacgggtggaagagttgttttgcacaggcgtataagagcgacggctactactgttaccggttgaataattgcgtgttgacgatgcagaactgcccctgttgtaagtagaaggacttccggctgcggaacgtcttacacctgtagcatgtacacggctactacttccctgcactcctgaagctgaagaacctacccgcgtactgcttggacgggtatataccctgcgccgggtagaggcggcatctgtacgggtagttaccccactgcgtgtacccgacggacgtgtacctaccacgcgtctggtggtcgtaccgctttgtccgtctcttctataggatgacacacctgaacggacagccgaaccggtcctgcgaaccgtagaagaagaatttctataactgcttgctcccgaagaacggcgataggtatatgtattacgcggccaataatcgccgccgggataacagtgatgatgatagtggtgatgtccccaccagccgcctccataccagccgccccagcttacgctccagccaaagccccagcccggaccataccaactgttccaaccccagccataatagggatagccgccccaaccgaaagagttatagcgccaatcccaccacaaacggttggtgaaggtaggaaatgcatatgcgtacaatccgtccgtatatacattccagtcccatggattcagaccataaaccacatcccagtaaagcgggctgctgatactgatggcatagcgtggattgcggaaacggataatgcgcgtggcatattcataatcatcttccgaaccgtcaaaaccgttcacccattctccatccaggccatcgtcttctttttcgtctatataaagcgtatcattctcttgtgaaaagtcatagtctttagagtcataccgacgattatactcgtctacatcacgaatattccctttacggtctttcactacaatggtcgtattgcccggcgacgcataaaccgtagtcggagcatttgtctttactacaaccgcatcggcagccggagtttttttcttctccgtcttttcctcttttttcttggaaggaacgtagtaaaggtcgtcatctacactttgagctgaaagtgcccacggaagacacaatgcaaaaagcgataaaaaaacaatctttttcatatttatttggtttatgggtttacaattccatactttttcacaccacaaagataacgcagggatttactctatacagaagattttccccaaagatttatagggatttccctaaatgcacctatctttgtatccaaaacaaatatacgcagaaataggattttctcctatacctgccttttgcatttaacaaacaattatattccaatgaaatatttagaatttacattccataccactccctgcacggaaatcgtcaacgatgtcttatcggcagtgctgggtgaagccggttttgagagttttgtagagcaaacagacgggattgccgcctacattcaaaaagatttatacaatgaaactgtcctcaaagaagctcttgccgattttcccttacctgatacacaggtagaatatgcttaccaagaagcggaagacaaagactggaatgaagaatgggaaaagaatttcttccagcccattatcattggcgaccgctgtgtcatccacagcacattccatcgcgacatccctcaagctgaatacgatatagtcatcaaccctcaaatggcattcggtacaggacaccacgaaacgaccagtctcattatcggtgaattgctggataacgatctgcaaggcaaatctttgcttgatatgggatgcggaacatccattctcgccatattggcacgtatgcgcggtgctgcgccctgtacagccgtcgatatagatgaatggtgcgtacgcaactctcttgaaaacatagagctaaatggagtagaccgtatatccgtttttcaaggagacgcttctctattgaaagaccaaggaccttttgatgtaatcatagccaacatcaaccgtaacatcctgctgaacgacatgaaacgatatgtaagttgcatgcatccggggtcggaactatatatgagcggtttttatgtagatgatattcctgtaatacaggctgaagcggagcataacggactgcgcttcgtacatcataaggaaaaaaaccgttgggccgcagtgaagtttgtattatgacacaacgataaaaggaagaaaacggaaagcaagctattgcagggtcataccaaccaattcttccaacgtgccgttaaaaacattcagatcgacttcttcttcaatgccggggacattacctacatcggtatgttgccaaaagtgccatttgccctcatacttcacggaatcaacgtaataatgggctatccagtaaggataagcgttgaatatggagtcgttgagataacgtttcttaaatttataggaagtgtaaagaatcggttttacgccgtaatgcgcctccactctgtcaagccaggttttaacggcagatttcagttcctgaggagatctcttacccgtagtttccacatcaagaacggggggaaggtctccttttgacaagtgtactgtactaataaaaaagtcagcctgcttatgcgcatctgtcttgggtaggaaataatgataagctcctcggataaaaccgtatttccgtgcctgactgaaattttctacaaaagtttcatcgccataatcgcccccttcggtagctttcataaagataaaatgtatgggaaatttcgcttctttattatgaaggagcttatcccaatctataataccctgatagtgggaaatatcaatgccatgcacctcatagttgcaaggcatgcatacgccgtagccttttaaaccataacaaggtttccaacgataagcataaggacggataaagaaccaatagaatcctgctgaaaataccgctataatacaaaatgccaataaattacgcaaccatacaggcatgggacgagacaccgtctgcttcttttttcgagaagaagtacgacgggatacaggtttgcgccgggaaactgtactgtttttagaaggcattcaagtatattgaagtaacaaatatctatcaaaaataaaacacaaactacacagattacacaaattcggatttgcgcaactcttgtgtaatttgtgttctacatagccaattactgcaaatgcagcaattggctataagattttatttaccttgttccagttgcaaagtcttggtaggctggtcgcaaacttcggcaggaccgaagtattggataggacccggataaacatagtctgtttccacagcccaacgctcacgctgagcggcaaatgccttgaaaggagcaccgtccagtcttaccaaagctttctggataaccggtttcatttcgccgtgacgacgttccatattcatcatcattgtaataggtacaccacctgcaatccactcttcggcaggagctgtagtattacgtacggaagacatgtaaccggtcttaccgttagcaatcagcgcagatgccgcataacccaaagagtagcagtagtcagcatcgaaattagacggagcagcgcaacgtccttcataaccgaagaagtgatgctgtgcagcgaacttacctacatatttaccttcttctttccactgagccaatttggcagctaccatttcggacaacagtttctccgtttcaatgagagatacctgtacgtttccatgcgggtcgcggtccaatgacaactgacgcgctacaccttcgggaaggctggcatagatagcggcattttccggagaaagtttgcggatgatatagtcgcgttggtgtgacttcttaatctgagagaattcctctgcattggcagccaggaaatcattcaactcagcgataagacgtttcatagcggggatgaactcaaccaagccctcggggataagaaccgtaccgaagttattgccctgtgcggcacgattagccaccacctgagcgatacccgttacgatatcatccaaagacatatccttagcttcaacttcttcggagataatgcagatattaggctgtacctgcaatgcacattccaaagcgatatgtgaagcggaacgtcccatcagttttatgaaatgccagtacttacgtgccgagttacagtcgcgctggatattaccgattacttcagcatacgttttacaagctgtatcgaatccgaaagaagtttcaatcatttcgttcttcaagtcaccgtcgatagttttcggacacccgataacttgtacaccgcaattcttcgcagcataatactcagccaatacgcaggcatttgtattagaatcgtcaccaccgataataaccagtgctttgatattcaattccttcaagatttccagtcctttttcaaactgttcctctttctccaatttggtacggcctgaacctatgatatcgaaaccaccggtattacgatattcatcgatgatatcggcagtcagttccatatagttatggtctaccaaaccaccggggccaagaatgaaaccgtacagtttactatctttgttcaactttttaataccgtcaaaaataccggatatcacattgtgaccaccgggagcctgaccaccggaaagaattacgcccacattcatagcagggaaatcaacggtttcatcggtattttcgaacttaatcaaaggcatcccataagtattgggaaacaatttcttgatttcttcctgatcggcaaccgactgggtagctgcgccggccactgcttttacagtacctgtcagccctttcggaagtttgggctgataagcagcccttgcaatttgcaatgcacttttagtcatttctcttaaatatttaaaggtgttaataaagtttcgtttaaaagcgtcgcaaatttcgctcttttccgcaagaaatgcaaactgaatgaagaaataatgcaaacttattcttctatctgccagcctccacccaaagccttataaacatttaccactgctatcagttcgtcacggattgcattgctgacaccaatctgggcatcgaaatatccacgctgggcatcaagcacgtccatataattaataacaccattaatatattgcaactgcgctaaatccacgtacgttttggctgaacgttccaacttgagacgcaactgatacacttcctttattttgttgaagtccacaattgcgttcttagcctctttaaaagcattcagcaccgttttctcatagctatgaacttccgcctcaaacgaagctttctgtgcctttagagcagcccgatttttaccccaattgaaaagcggagtcaataccgctccgttcaacaatgaataaggcgactgaaggaagtttgacaagacatcactctccaatccaaactgaccagtcagcgacaaccgagggaacatattggtataggccactttcacacgagcatgttcagctataagctgctgctctgcagcacgaatgtcaggacgacgttccaataagccggacggcaatcctacaggtaaagactccggcacatccaactcctccaaaaagcggctgcgctctatacgtgtaggaaattcaccggcaagaaaagctatgtcattctccttaatggaaatcttacgttccagatccggaacaagcgtagctgtacgcgccaactctacttgcgcctgctgataagatgtctccgaagtaagtccgccttcaaaacggattcttgcaagacgcacaccttcttcacgagccttttgtgtctgacggacaatttccaattctgtatcgagtgctaccagttcgtaatatgcctgcgccacttccgcaacaattgtcatacgcaaggcacgctgtgattctacactttgcagataatcggcaacagcagctacttttttccaacgcagatttccccaaaggtcaagttcccacgacaaaagagcctttgcttcatagctgttacccacatcgcggctatgtccgccatagttttcaacttcacgctctgcctctatttttccatttaactgaggaagtagattagctacgctgatacgtttctgggccgccatttctttcacacgagcggccgcaacgagcatatctttattatactccaatgcgcgtgctatcagattacgcaaagtattgtctgtataaacagcctgccactgctcatcggcaatgctgatgctgtcctgctgttgcatcaaactgtcgggcaatgccatttcgggacggacatagcttttgcctaccttgcacgatgcaaaaagaaccggggcgagcaacagaagtatatatatattcttttttttcataagcgtgtaatcagaattcatttacaatgttatcatcaatcttttttgattttgtgttgcactttttcctttgccttataaatcaaaacaaagaagaaaggcacaagcacaatgccgaatacaatggcaaaaatcattccaaagaaaactcccgtacctattgcctgacggcttgcagatcccggtccgcttgcaagaaccataggaagcatacccaatacaaaggcaagtgaagtcatcaatataggacggaaacggagttgggcggcatgaatggccgactgcaccaaatctcctccattatccacctgtactttggcaaactcaacgataaggatagcattttttgctgcaagtcccaccaacattaccaagccaatctggaaataaatatcattttccaagccacatacagcaacgcccaaataagctcccaatgcagctaccggcaacgaaagcaatacagcaataggcacagtccagctttcgtattgtgctgccaggaacaggaatacgaagaggaataccaacgtcagtaccagtccggtctgcccaccggctttcttctcctgataagaaagtccgctccactcaacacctatattatccggtaaatgttcgcgcgctatctgttccataatctccatagcctggccggaactgtacccctgtgccgccgaaccgagaataactgcagtagtaaacatattgaaatgtttaatactgcccggaccggttgtataggatgcattacccaacgaggttaacggaaccatcgcaccattagctgcttttacaaagaacagattaatgttctctttgtgctcacgatacggagcttcagcctgaatatataccttatatatacgattgaacatattaaagtcatttacatatacggaacccgtataagctttcatcgtagagaacacatctgccaacggcactccctgcatcttcaccttgtcacggtctacatcaaaatagagttgcggaatctcagactgcaaagaagaagaaagccccgtcaattccttgcgtttctgagcataatacatcaaagtatccgctgcctgtaccagattttcaaaagtagcttccccacgtgcctcaagttgcatttcaaagccaccggatgttcccaaccccgggattacaggaggagtagaaagatagactctacattcggggtattccctcaaatccttttccactttctccattatcttattgatagtggtatttttgcgttcctcccagggcttcaatataacagttaactcactgcgcgcctgattgcttcctacacgcggactactacccgttacattctgcacataagccacatacggattctgctccagatactgcacggcacgatcggtcacgatacgggtacgttccaaagtagaaccttccggcagttccaactccactttaaagtatccctggtcttccaccggcaagaaactggtaggaatcagacggtgaatgatgaaaatagctatcaataccataccgaatgcactcatcaaacgtctgggatgcttgataacgcggctgataacaccaatatacttatgattactgatattcaaccattcgttaatcttacggaacacgatattctttttctttccgctgtcgggcttcaggataagcgaacacatcacgggactaagcgtcagtgccacaactgtagaaagcaataccgatacagcaatggtaatagtaaactgacgatataattgtccggtgataccgctcaggaagcttaccggaacaaatacggcacagagcaccaatgaggttgcaatcaaagcacttgccaaaccgttcattgcttttttcgttgcttcataaggagagagtttttccgtttccatcagatgttccacattctccactaccacaatagcatcatccacgacaataccaatagcaagaatcaatcccaacaatgtcaatatattcagcgagaaaccgaaaataagcatgaaaccgaaagtaccgatcaaagaaataggcactgcaacaacaggtatcaaagtagcacgccagctttgcagtgaaaggaacactaccaataccacaagaaccaatgcttcgaacaatgtcttatacacctcgtggatagactccgaaatataggtagtcatatcaaaaggtatctcgtaactcattccttcaggaaagttcgcactgatttcttccattgccttcttcacgttgtccgccacttccatagcattggcacccggaagcatataaatgccgagaactgccgcattttcaccgttaataccactttccgtactatatgaggaagcttcaagtgacactctggccacatcgcgaagacgaataatagacccattggcattggcacggaccacaatatcctcaaactgctttgccgagctcaaacgaccttgcgttgtaataggaattgtaatgtccaaaccttgcaccggctgctgtcccaaaacaccggcagccgattcgcggttctggtctttcaaagcattctgcaaatcctgaacagtcaatccgaaatttgccagtttgtctggcatggcccagatttgcatggcatagtaacggctaccgatattagacacacgtcccacaccgggaatacggcgtaaaaggtcgagtacgttaatagtagcaaagttactcagatagatttcgtcgaatttcggatcattggaagtcaaacagattgtcatcagctggctgggagcctgcttttctaccgaaataccattctgaatgacttccgcaggcaaacggctttccgccagctttatacggttttgaatttccacggcagccaaatccggatcggcagatacatcaaaggtcacggttgccgaaaagccaccggaattggaactgttggactccatgtacaacatacccggagtaccgtttatttcctgttcgataggagtcgccactgcttgtgacacagtcagcgcacttgcccccggataggatgcactgattttcacaacgggcggtgttatctgtgggtattgatccaccggaagcatagtcagaccgatgataccgacaattacaatcacaatcgatatcaccgccgagaatacagggcggtctataaagaaacttactttcatactgttattttactttgagagattcttatccttttctttattctcagaagcggctttcttattcagagaatctgccggctgttcatcttcctttttgggagcagctgcttgtgcacgcactttcattcccggagtaagtttatgaaaaccttccgtcactacctgctcgcctgccgccagtccgcgttcaacaaccatattgttaccaaactcaggtcctaattcaatgaagcgcttttcaactgtcgaatcgcggcgcattacatatatataagcaccgcctttctcaatggtaacggccttttgaggaactgccacagcaccttcgcgtacgtccaacaacagttttactttcgtaaactgtccgggcagcaatactctgttcggattaggcatttcggcacgaacggagaacgtaccggtttgcgggtcaacctgcggttctgcaaaatcgacataacctttgtaaggataaacagtattatcagccaaagtaatcgtgatattaggctgccaagagcgggtagaatcctgacggcctatctctatattgcgctctttgcttttaagatagtccaatgcggtcatgctgaaatctaccaataccgtatcactttttactatggtagcaagcaatgatttagccccgggacctaccaatgttcccaagtccacatttctttcactgatatgccctgacaacggagaacgcacaatggtataccccagttccaattccgcctggtccagatcagcctgactcatagcaacagaagcctcggccgtttcataagcagcctgcgcattatccaaatccaactgactggcagcattctgtgcatacaaaggacggatacgttccaaatcccgtttggctttcaacgcctgcgcttcatctttctttaactgtgcacgggccttgtcagcctttgcacgatattggtcttgattgataacaaataaaacctggtttttagttatatacgtcccttcggcaaaaagcatattctccaaatagccttccacacgtgcacggacttccacaaactgttgtgcacgtatacgccctacatactcaccaaaaatttccacatcacccacttcggcaggttctacaataacagtaggtaattccggctgaattttcttgggccaagtcaatatcagataaccggcaagcagcactgtcatgcaggctatcatcattatcacccgtttctttctcagctttaattctttttttgtaaaaaatagtctcatgcttgtttgtttatttaatttaaccctatttcccatttcaaagcaaacgcaatgccaaagcaggacaaagggtattctttattatataatagtttagttatcagacatgaacatatatataagtagtaatattccacctgctttccacactcacattgtagaaaatctccacaaatgtagaattattccacgaactatttctcattaaaaacacataaattttcatttttccactcaactcatgaagaaaaacactatctttaccgaaaataacactattcattcacataaaaagtaaagattatggcaagtagaaaagcattgaaaaagaacgtcaattatatcgccggtgaattattcgccgaatgccttatgaacagtctgtatgtacccggaacagacaagaagaaagctgatgaactaatgggtgaaattctgaaaatgcaagatgaattcatcagccgtatcagccataccgaaccgggaaatgtaaaaggttactacaagaaattccgttctgattttaatgcaaaagtagactcaatcattgaagctatcggcaaacttaaataataagaatgaagaaaagactatatagttttatctattatcgcctgttaggttggaaaacaaatgtaacagtgcccaactatgacaaatgtgtcatttgtgcagcgccacatacatccaactgggatttgtttatcggcaaactgttttatggtgccatcggacgaaaaaccagctttatgatgaagaaagagtggtttttttttcctttgggattgatattcagagctatcggcggcataccggtagaccgaagccggaacacatctttggtagaccagatggcaaacagatttgccggaagcaaactgtttcatttagccattactccggaaggtacgcgcaaatccaaccctaactggaaaaaaggtttttacttcattgcattgaaagcacaagttcctatcatgcttatcggtatagattatcctaccaagactataacttccaccaaggcaataatgccaacaggagactttgagaaggacatgcatgaaataaagctctattttaaagattttcgcggaaagattcctgagaatttctccgttggaataaattaaaagacaaccgatagcaactgtttactaaaatgaaccgactgcgtgtcagtatcctacaaatggatattgcttgggagaataaacaagacaatcttcgccgtcttcgcgaaaagctggaagctcttcgcggagcgacggagattattgttttaccggaaaccttttctaccggtttcagcatgaacaccgacacattggcagagccggtaacaggtaatacaattacaacactacgccaatgggcttcagaatatcagatagctattgccggaagctacatagcttgtgaagagaattttgtttcatctgaaagcaatccattatcctacaaaaactctacctattacaaccgcgcctttttcctcactcccgaaggggaagcttatttttacgataaacgacatctgttccgcatgggcaacgagacagataatttcacggcaggcagccgtcgtatcataatttcgtatcgaggttggaatatactgctactcgtctgctacgacctgcgctttccggtatggagccggaatacaggcaatgaatacgacctcctgatttacgttgccaactggcctgtaccccgacgtaaagtctgggacatacttttacaggcacgggcattggaaaatatcagttacgtttgcggtgtaaaccgtatcggtaaagacggtaatagcttctcctataacggcggcagcgcaatctactcatacaaaggtgaaatgcagattcaagtgcccgaccatgaagaaggaacagctacggctactcttgaactttccgcactacaagaattcagaaacaaatttccggcatggaaagatgcggattcattcactatcgtctcagatagtaattcacggtagtcactacccgtatacttttaatataaggcgtattggcatctctgtccgatatggagaattgtccctgcgaagcattccgtatcttacccaggctactgtctgagtcttttgcaaacttttcggcagcggtacgggcatttttcgtagcttcttctatcatttgcggtttcacatcattcaagcctgtaaattcatacaccacattatagcgataatcacctccactgatggcaataccctgtttcaacagttcagcctgttccgacatcagtttccgtaccttatctacattttttgaagtaaccgtaatgactgatgtagcattataccgataagcaatatcacgatttccatagcgttcggcctgcatatctatcacttccggcggggcaatactgatttcttccttagcaatgccgttgctttccaaaaatttcacaattgccttgtttttctgttccatattggcataaagcagcgacggatcattccctatatctttatacatcaagggccatatcaccttatcagcaggaacttccatctcagccaacccttttacactgacaatacgttctttatctataaaatcatttataccccatttaattatcactcccagcagtaccataccaacggcaataatagccgcttctactttccatgttttcataatccatcgttttattaagtttatcaataagtaaaacaaaataacgaaaataaagttcccgcttaccatcatcctgattaaaagatattaaacaggtatttctttaaacattacgtattaaattttagagtatttaatagaaatacctaaatgtatggagtgcatcttacctaaaaagtagttatttttgtcctttgaaataatgtctgacgactgaaacaattaatttattaacactaacccctaaatcctatgttgactcaacttatcaacgcacgtattctgacccctcaaggttggctcaaggacggttccgtactcatcagagacggaaaaattttagaagtaaccaattgcgacctcgccgttatcggtgcacaactgattgatgtaaaaggaatgtatgtactgcccggcggtgtagaaatccatgcacatggcggtggcggacgcgattttatggaatgtaccgaagacgctttccgcggtgcggtccaaacccacatgaaatacggaactaccagcatattccctactctgtcctcttctaccgtaccgatgattgaacaggcggcagagacttgtacgaagatgatggcggaaaaagacagtcctatactgggtctgcacctcgaaggccattatctgaacatggcgatggcaggcggacagatgcccgagaacatcaagaatcccgaccctaacgaatacattcctatcgtggaaaactggcactgcatcaagcgttgggatgctgctcccgaattacccggagccatgcagttcggaaaatatatcaccggaaaaggcattttggcttcggtagcccatacacaagccgaatttgaggacatacgtacagcctatgaagccggatacacacatgctacacatttctataatgcaatgcccggattccacaaacgccgtgaatacaaatacgaaggcactgtggagagcatttacctcatggacgacatgactgtggaagttgtagccgacggtatccatgtaccgcccacaatcctgcgcctggtctacaagataaaaggtgtggaacggatgtgcgccatcaccgatgccctggcatgtgcggccagcgacagcaaagaagctttcgacccgcgtgtcatcattgaagacggagtctgtaagcttgcggaccactccgcccttgccggcagtgtggctactatggaccggctgatacgtacaatggtgcagaaagccgatatacctctggcagacgccgcacgaatggtatccgaaacaccggcacgcatcatgggtgtatacgaccgtaaaggctcgctccaaaaagggaaagatgccgatattatcgtaatggacgaagatttgaagattagagcagtatgggcaatgggtaaattagtgcctgaaaccgatactttatcataaaatttatcccaacatcatgcggatgaactttgtttttcgtatttttgttaagttttgaacaagcgaacagctttaatcatttattaataaccaaatattgtatgaaaaccaatcttagttctcaaattactctgaatagagtatcccccaggtactacagaccggagaacgctttcgagcgatcggtactgacacgtctcgagaaaattccgacagacatttacgagtctcccgaagaaggagccaaccaaattgcattggacatcgcacagatgattcgtgacaagcaaaaggccggacgcttctgtgtattggcactggctggcggcaactcaccgcgcaatgtctattcggcccttgtgcgcatgcataaagaagaaggactgagtttccgcaatgtagtggtattcaacctttacgaatattatccgttggcttcagacgctgtgaacagcaacctcaattctttaaaggaaatgctgctcgaccacgtagacattgacatgcagaacgtattcagccccagcggtactatcgccaaagatactattttcgaatattgccgtttgtacgagcaacgtatcgaaagtttcggcggcattgatatagctgtattaggtatcggacgtgtcggtaatatcggtttcaacgaaccgggttcacgcctgaactccaccacccgattgattttgctggacagtgactcacgcaacgaagcatccaaaatgttcggaagcattgaaagcacaccggtaagttccataacaatgggtgtagccactattctctccgccaagaaagtatatctgctggcatggggtgaggaaaaagccaaaatggtaaaagaatgtgtggaaggtaacgtaacggatacaattcctgcctcttatcttcaaacccataacaatgcccatatcgccatcgacctttcggcagccgccaatctgacacgtatccaacgtccctggctggtgacttcctgcgaatggaacgacaaactgattcgcagcgccatcgtctggctgtgccaactgaccggaaagccgattcttaaactgactaacaaagattataacgaaaacggtctgagtgagttgcttgccctctacggttctgcttataatgtaaacatcaagattttcaacgatctgcaacacaccatcaccggttggccgggcggcaagccgaatgcagacgacacttatcgccccgaacgtgcgaaaccgtatccaaaacgtgtcattgtattctctccgcatccggacgatgatgtcatatccatgggaggtactatccgccgactggtagaacagaaacatgacgtacatgtggcctatgagacttccggcaacattgccgtaggcgatgaagaggtaatccgtttcctgcacttcatcaacggtttcaaccaactctttaacaacagtgaggaccaagttatcaacgaaaagtacaccgaaatccgcaactatctgaaagataagaaagacggtgatatggacacccgcgacatcctgactatcaaaggactgattcgccgcggtgaagcgcgtacggcatgtacctataataatatcccgttggatcactgccatttcctcgacctgccgttctatgaaactggtaagattcagaagaaccccatcagcgaagccgatgtggaaatcgtacgcaacctgttgcgtgaagtgaaaccccaccaaatcttcgttgccggcgaccttgccgacccacacggcacacaccgtgtttgtacggatgccgtattcgcagctatcgaccttgaaaaggaagaaggagccaaatggctgaaagattgccgcatctggatgtatcgcggtgcatgggcagaatgggaaatcgagaacattgaaatggcagtgcccatcagtcccgaagaattacgtgcgaaacgtaactctatcctgaagcaccaaagccagatggagagcgcaccattcctgggcaacgacgaacgtctgttctggcaacgaagcgaagaccgcaaccgcggtacagctgcattgtacgacagcctgggtctggcatcctacgaagctatggaagcattcgtagaatacattccgctgtaaatgtttgctaaatagaaacaaggaggttgtgtcaaaatgctgacacagcctttttttatgcgcaaagcccagactttctcaagcccgggctttgttattacccaaagttttcgtatctttaggcataaagtttttcgttatggcaaagttacattttcgtccttacattcccaaccaaaccgttctttttccacaaagaattgatgaaaacatagctgcgaacgacccggttcgcatcgtgaatgctgttattgacaacctcaatcttgagagtttcaagaagctttataaggaaacgggccgttgtccttatcatcctaaaatgatgcttaaggtgataatctacgcctacatgaataatatctattcttgccgtaaaatagagaagcacctccttcgtgacattcattatatttggcttgccggtaatgagcatccggattttatcacgatcaaccgttttcgtaaccgtgtaaaggaggaaataaataatgtatttacccagttggttcttgtccttgccgataaaggcttcatcagccttgatgtggagtatatcgacggtactaagattgaatccaaagccaacaaatatacttttgtctggcgcaagacagtcgaacggaaccgtacgagactaatggataaaatccgtattctcttggagcaggtggatgaaaccattgcacaggagaactctataaaagacacatccgtggagtttacttcctgcaagctctctgacatagtggatgaacttaaagaagccctggaacgccagcctgcaacaaaggataaggaagaaaagaaagctctgcgcaaaaagaagaagcaggtcagggaacttgaagggtatcgtgacaagctgatagaatatgacaatcaccttgatacccttggagaacgtaactcctattccaagaccgatcctggtgccacattcatgcgcatgaaagaagatgccatgaagaacgggcagaccaaacccggatataatctgcaaataggtactgaaaaccaatttatcacagacttctgtctgtttcccaaccctaccgatacactgaccctcataccttttttccactctttccagtaccgctataaccgtttaccgaatatctgcgtggcagactccggttacggttcggaagaaaattaccggttcatgcaggagaatgggatagaagccttcatcaagtacaattacttccataaaaaacagcgtccccgttatactcccaacccgttccatgccgaaagtctccattacaatgagggggaggattattacgtttgtcctatgggacagcacatgaaccgtataggaaccaaacgtgacaagacagcgagtggatacatcaccgaaagtgcccggtataaagcaaaaagatgcgaaggttgccctttgcgtggcagttgttttaaagctcgggggaaccgtattatagaagtcaaccaccgattaaatcaatacaaacggcaggcacgggaaagattgctctcagaagaaggtatcaagcatagaggcaggaggtgtatagaaccagaagctgtgtttggacaaatgaaatacaacatggcatacagaagattccggcatgtgggagaagacaaggttacaatggactttgctttctttgctatagcctttaatatcaaaaaaatgtgtgctaaactgataaaagaaggaaaggggctcattacagttgccaaatatatgtttatgggactatttataacccgatataattggaatatagcaacttgttgccaaatgcatgaggaaaaagtagcatagccaaaagaaaatatagcagaacttaaaatataaatgaggttgtgccaacgttttgacacaacctcttttttatgtatttttgtacggtacttaaccatcggacatgaaaaaactatatttatccatattgttcctgcttgcaggagttggttccgtcttttcacaagacgtagaacaggccgttcgggaacggctgcaggcctttttccaaacgtatatccctgtcaatgtcaatatcggtacatgccgactcgacagtgtacttatcgatttccaccgaaaaacaatccgcatctatgccgataatacattctcctaccagcccttccggccggaaacggtgaacagaatttaccgggacatcaaagaaattcttccgggtcccgtaacttactttgacattactgtctttacagacggacattccatcaacgaacttattcccaacacatacagaaacggaaaaaaagacaagagccgcctgtttaccgatatacactataaagacgctccctgggtgacccgtacatcccgtccttttgaaataacccgcggactggagggacgccatatcgctctgtggcaaagtcacggaaaatactacattaataacaaagacaaatggggttggcagcgtccgcgcttgttctgtacctccgaagaccaattcacacaatcgttcatcctgccttacctcatcccgatgctggaaaatgcgggagccaacgtattcacccctcgcgaacgggacacgcaaaaacaggaaatcattgtagataacgatgacaaccggaacaccacaaactccctctatcttgaggtaaagagcagaaaagcacagtgggaaaaaaccgctctgcctggatttgcacaacagaagcgtatctacacggaaggagaaaatccttttcatgacggtacagcccgctttgcacaaactgaaaagaagaaaaacaaagcctttgccgagtgggttcccgacatcccggaaaccggagaatatgctgtatatgtttcctatcaaagcctgcccaacagcgtgagcgatgccaaataccttgtattccataacggcggtgtcgctgagtttaaagtaaaccaacgtataggcggcggcacatgggtatatctcggcacttttactttcgacaaaggaagcaacgactacggcatggtagtattaagcaatgaaagccgggaaaaaggagtggtatgcgccgatgccgtgcgcttcggcggtggtatgggcaacattgcgcgcggcggccaagtcagcggtctgccccgttatctggaaggcgcgcgttattccgcccaatgggccggtatgccctaccccgtatatgccggatacaaaggacagaacgacctttcggatgatatcaatgtacgttcgcgtacaatcaactacctgtcgggcggttctgtattcaaccccaaagaaccgggattgggagttcctcttgagatgagtatggcactgcacagtgatgcgggtttcaggacagacgaccggattgtaggtacactcggcatctacactacccatttcaacgatggcaagttagcggcaggaacaaaccgctacgcttcgcgcgaccttgccgacctgttcctcactcgtctgcaacaggacatccgttccactttcaatgcagactggacgcgccgcagcatgtggaaccgtaactacagcgagacccgcctgcctgctgttccttccacaatcgtagaacttctgtcgcaccagaattttgccgacatgcgcttgggacacgaccccaaattcaagttcacggcaagtcgtgccctatacaaatccatcctgcaatatatctgtacccagcataataaagaatacgtcgtacagcccttacctgtcaacaatttctccgtccgcttcggtaagaagaaaaataccctggaactttcctggcaaggagtggatgacccgttggaaccgactgccacaccccgcgaatacattgtctatacacgcatcgggcgaggcggatttgacaatggtgtacgcgtaagcaatcctttccacactctgaagatagaaccgggcatcgtctattccttcaaagtaacggcagtgaaccggggtggtgaaagcttcccgtccgaaatccttgccgcatacaagtccaagcacgaaaaagcacgcgttctcatcatcaacggtttcgaccgtatcagtagccctgctgtgataaacacacccgacgaagccggctttgatttgacgaaagaccccggagtaccttatctatatgatatatcactctgcggcagccagctgaatttcgaccgcaaagaagccggaaaacgtttgggagaaagcggcaatgaatacgaagggataaaaataaccggaaacacattcgactatccctttatacacggtaaagccatacaggccgtcggcagctacagctttacttcatgcagcgacgaagccgtagaaaacggtagtgtagcattggaagaatatccaatagcagactatattctgggactggaaaagacggacggcaatctgtcacgggcaacctattacaaaactttctcttcgtccatgcagcgtgccttgacagcttactgccggtcgggcggcaatctactggtcagcggtgcatacataggcagcgacatgaacgactcgcaaggcaatcgggaattcacccaaaacatcctgaaataccgtttcgacagcagcttacaggtatccggcgaacatatcggcatacaaggtttggggcgcatcctcagcattccccgcctgcccaatgaacgggcttatcccgtgacgacccccgattgtatccgccctatggcaaccgcctttcccgtaatgacctataccgggagaaatcttcctgctgccgtagcttataaaggtaacgactaccgcacattcatcatgtcatttccctttgaaagtatccgggaagaagccggcagaacagcggttatggcatccattctgcatttcttttccgccgataatgcaggtgtacacagagaataacggcaatcttgataaataatccggtgaaataggtataatctgtggtgaaaaacttatctttgcttttacagaaaatatgaatcactgaatattaaccattaaaacattaacgccatgtacactatacaagccaatcccagcggaacccgcaacttggaaatatcggaagaaaaccttgccactatcgaaaaatacggtctcttccgtcatctcatcgacagtaacggcatcgtggacgaaaccgtgctcgacaaactcaaactgaatatccgttccctcatcgccgcccaggaagaggacagcaaagacctgctcgacctctgcatcgatgttatctaccacaacaatatgaaagccttcggattacagcagcttatcaagctctacctgcaatggctttcccaacaaacaaccatagaagaggaagaaaataaatgagaaccatcgacacacgcggacagaacctgtacagtcctcttattccggccataaaggccatgtgcgaagccggaaaaggcgagaaactggaaatcattatggacgatgcaaccgcctttaatgacctcaaagagtatcttgccgaacagggaatcggcttccgggagatttatgacggagaggaaatgctggtacaattctgtaagtaattaaaactttccgtatctttgcacccatgaaagagtacagactgactgattggttgcctacaaccaggaaagaagtggaacttcgcgggtgggatgagctggacgttattttgttcagcggtgatgcgtatgtggatcatccgtcattcggggcagccgtcatcgggcgcatcctcgaagcggaaggtttgcgtgtggcgattataccccaacccaactggcgagatgacttacgggatttcaagaaactgggacgtccccgtctcttcttcggtgtcagtgcaggctgtatggacagcatggtcaacaaatacactgccaacaaacgtctgcgcagcgatgatgcctatactcccgacgcacgtccggacatgcgtcccgaatatccttcgattgtctatacccaaatactgaaaaagctatatcccgatgtacctgtcatactgggcggcatcgaagcaagcatgcgccggttgacacattacgactattggcaagaccgtgtgcgcccaagcatcctcgtggacagcggtgccgatgcactgatatacggcatgggtgaaaaacccattatggaacttgtacgaaaactgaaacagcaacaaccgattcttgacatcccccaattggcttatcttacgaaagaagtgctgccgcaagaaggagatatcaccctattcacacatgaagaatgtctgaaagacaagaagaaacaggcttccaacttccgccatatcgaagaagagagtaataaatatgctgcttcgcgtatcttgcaggccgtaggcaggcaaacagtcgttgtcaacccgccttatacgcccttgacggaagcggaactcgaccgttctttcgacctgccttacacgcgtctcccgcatcccaaatataagggcaaacgcatacccgcatacgatatgattaagttctccgtcaacattcatcgcggatgtttcggcggttgtgctttctgtaccatctcggcacatcagggcaagtttatcgtcagccgcagcaaggaaagcatattgaaagaagtaaaggcagtaatggaattgccggatttcaaagggtatcttagcgacttgggcggtccttctgccaatatgtacaagatgcggggacgtgatgaagccatatgtaagaagtgcaaacgcccgtcgtgcatccaccccaaagtatgtcctaacctgaatacagaccatagtccgctactcgatatttatcatgcggtagacagtctgcccggcatcaaaaaatcatttatcggcagcggtgtacgctatgacctgctgctgcaccaaagcaaagaccccaaaaccaacaaaagcacgcaggaatacacccgcgaactcatagtccgccatgtcagcggccgccttaaagttgcgccggagcatacctcggaacgggtactcagcatcatgcgcaaaccgccattcagccagttcggagagttcaaaaagatattcgaccgtatcaaccgcgaagaaggtctgcgacaacagctcatcccctactttatctccagccaccccggctgcaaggaagaagacatggcggaacttgctgtcatcaccaagcgtctggactttcatctggaacaggtacaggactttactcctacccccatgaccgttgctaccgaagcatggtacactggtttccacccctatacactggaacccgtattcagtgccaagacccagcgcgagaaattggcacaacgtcagttcttcttctggtacaaacccgaagaacggagaaatattatcaatgaactgcgacggataggacgaaaagatttgattgacaagctgtacgggaaataacagcaccgacaaccggaccatccatatcctgtgacaggcaactttcaataagttaaaacattcttttctattaaaataaacttactttcataaaacaaatgaatagttatcgatgttgatagatgacattgcctgataactatttgtaaaaattagtatacaggcatatcattagaagctaattgttccgtttgcaataataccatccgaccaattaaaattctcttgaacttagtaataataaaagtacgaaaaccggacatcgtatccggctttccggactccaacactctcttaaaagcaatcggttggtaacaaaaagtcagtagcaatgatacagcgtacaattaaaaacagaatccgatactctaaatataaacttctgcttatgctcataggggtattatcggcacactcttggacacaagcgcaaaacagtccgccgaccaatgaagtgatgatcgacatcgacacaaccgcctcatgggaaaaaataaaaaagaaaaagacacatctggctctcaaaacaaatctcctgtacgctgctaccttaactcccaatctgggtttggaaataggaataaccccacagataagcctcaacatagtcggcagctataatccatggaaccgtgaagggaaaaaaggcgataatgacaagctggtacattggttagtgcaacccgaagtgagatactggctttgtgaagcatcaaacggacattttatcggcattcatggcattgtcacaaaatacaatatcgccgggtatagcctattcagcatgctcgataagaactatcgctacgaaggttggggagcaggagtcggaatcaattacggatacagttgggcattctccaaaagatggggcatagaggcttaccttggaataggagtcgtgcaattcacattcgacaagacagataacagggactggtgctgtaacaagtccgaacatgctgaaaagacctatttcgggcccacccaaataggcatttcattaatctacaacattaaataatccggagaaatataaacctaatgaatcctattattatcatcatttcattcatttcactactgatacctgcctatgcccgggcatcaacagaaagcgggtctcagggaagacacctgtccatcactcaaattcaagtgcggaatacaggtgacagtatagagctcagcttcagttgtgcttccgcccggttcaatacccgaaagccggaacgcattacggttactccggtaatttccgatggcgttcatcaagcacggttcccctcttttgcaataattggcaaaaggaagaggatgtcccctgcattacagtacaatgcaaccatgaaatacgaagactggatgcgaggaagcatacttacctttgaaagcaacattaaattatgcgccaaacaagccatactgacaacagccgttgtcaacaacagaatacttcaggacccggatgtggaaatcgtacaatttaccgataccgccgaaactgtcatacctgttcttactactgccgaaaagctggctcaagactacgattttctggctgacgagtccacgagaagcgaatttgatgaagaaaaccggagcaatgctgtttccattttatttaaaactggttcggcaaccctgcttcccgaataccggaacaacagtcggaatctggatttactggtcgatattatcctgaagattaaccagtctcccgacagtcgcatcagtcatatcctgattgcaggttatgcgtctcccgatggcgatatccgcataaactccgaccttgcaatgcttcgcgccgctgcattgaaaaagtatctgatgcggcacacccggctcgactccggtacattcgaggtaattaacggcaagatagactggtacggtttgtcccagatggtcggtaaatccgatatgccggataaggaaacggtactcaatattctcagtgtcactcccgtcgagggaagctcgggcaaacgtggcagaaagaacgaacttatgtacctgaaagccggagtcccttaccgttatatgctgaagaacttctttccggcactccgttcaagcacctgtatcaaggtattttacgaaaaaaaataagaatataaaataaaaagactcccgacagggagtatgcaattcacttttctaataacttaacaaaactttaattatgaaattaagaaatcttttggcagtttccgcaactgcattcacattgctgtcatgcaatgattcagacaatcatccgactcccggcaaaggtgagttaacccccattaccgtcaatataaaaggaaatgccgacacccgtgcactgacaggagaagaaacgggcgcaaccaacgaaaacgacatcaactcattggagttctttgttttcaacagcgacggttctttccagaagtattataaaccggcaagcgtggcatccgacaatcaatacacattccttgtcaacgccggcagtctgaccatccttactgctgccaaccaaaacttaggtgaaccctcacccgcccctgcctctttggcagatttcaaaaagagcagctcatacaaagagctttctttggatggcacaaactcccgttcggacatcagtacttccctcgggtttgccatggcggcagaagggacggccaatgtagtggaaggcgagacaaacaaattaagcctttccatacgccgtttgctgagtaaggttgaaagccccagggtagcccctaccaacgaaataaaaatacccgatgccgagttgcttaaaatattgggactcggcacttccgaaaccgttccaaacgatttgaaatggacattcaagggttatatggtaatcaacggcatcaaccaatcactggcttttgaatacgagaacctgacaaactgggaacgttttgccactgcatccaacttcaaaactacattcagccccgacggtgcaactgtagagaccgtatattccgtaaaaagcgatgataacagcgaaacatcaaacggcttcctgccggctggctacgacaaaccggtctatgtatacgaaaacattcctaccatgctgcaaggcggcaacggacaggcggcaacggtattcgacaaagatgaagttgtggctttcatcatcaagggaacattctctggcacaggagtttcagatgtgacccgctactggagagtcaatcttctgaaagacgacgcttggaaaatattccgtaacagcatttaccgcatcacgatgcaggacatcactaccgtaggatggggtactccgaaagaagccgaagaagaaggacctgttatcgacccttccgaaagcagcattacaatagacattgaagtagccaagtgggatgtcagaacccaagatgtagacctataaacgtacaaatatcgtgaagaaagtaattctaataatatcaatggcattatccctcaccggatgtacccatgaaggtcctcacacaggttgtgacgagggctcattgaatctgctcttcacatatgacggcaacacggccggctttgaccaaaccatagccgaagacatagaattatatctgtatgacgaccagggaaaaaagatgaatgaaaggcatatcccctatgaaaacatcaaagggggtaagccttaccctcttgagttgtcctattcgggaaatgcctatcttgtggcatggacattgacaggcaacgaggatatcaaaaagacttcccccgcattgcatgacgatgaaagctattccaccgccaggttcagtatgggcgaacatgccacgaagctgtcatctgcctataacggttccatgcaggaactcttcctgagaagtatggcgtttacccacaaccgacaggaaaaccgtattctcagtgtcgatgtccaaaaacagttatgcagcatttccgtcaccatagaagaaggaagcaatttcgcaacccgatactccggaacactcagcatggccatttacggttcatcccattcatacaatattgctgaagacaaacaaaacggcagcaggattgtgatagaagacagcttcgcctatatagaaagcagcaatgaatacgttgcggagaacaaggtcatgcctgcttccgtcgattcggcaaccgggcagagagacaacattgttgtcacgattcttgaagacggagcagcctgcctgagcgtagatacggagactcaagcgctacgaggcgcacaaatcaatgttgtaatcagaccgacgaaaatggaagcgattattacagtcggctcatggcagattcgtaaggcagtgactgtactttaataaaaaaacggtaaaaatatgagaaaatcatttatactattaacaatatgcgcattggcgggactttggtcgtgtcagtcaaggattgaagacgaaactcccattacgtacgcttcggacgaatccgaagtggaaattactgttgcagcggacagaacgccccgcaatgtcccgtcagccactccggacgaaaacatcatcgataatctggatatattgcttttcgattccaacggaaagtttatatgttggcgggcgactttcaagataaacggaaagttgcggacgactcttcccgtaggcaaagactacaatgcctatttcttggccaattgccgtagcttcatcggggaaatgcttcccgataaagccacggaaaaacaatacaggcagcaggcggattgggaagtctttcgaaaaaccttggttgatgcaaaccctcaaaggctgcttcaggaaaatacagcttttaccagcctgcccatgtggggaatgctgaagaagcaggatgtaaacgaccgtgtaatcaattattggccgctactgagcctaacccgttcggtcgcatcagtagatgtgtatgtagccaatggcatcgactattttacattaaaagacatcaccctgtttcatgtgcccgacaagggcttcttaggcaacgtccctgctaatgttacagatgggcaggctctggaagcctcctcacccgcagatatgcagaccggcctgactttggaatcggacagctacaacagcaccaaccgttccattgccaacaagctttatctgtacgacaacgatacggagaacgaaactgcagacaagaagcatacccgcctcatcatcggagccgaatacaaaggaacgaaaggctattaccccgttgattttgaagataccgatgcagacaagctcatcaaaatcatacggaacaagaagtacgtattcaatatcaattctgccgacggtccgggatatgcggataaggcaacagccgccagccagccttccgtccatatcaatgtcaacatcatagaatgggacatgacggaaggacagatgggagcaagcggcaattactacttgtggacggaaaagcgtgaagcggtattataccgcaaggcaaactctgctgttactatcggcatgaaaagcaacatcctgtcagaagctattaccatggcttttaaaacggacctaaacgggcctgccacaaacatcgcaaacggcatccgcaacaaccgcttcgaagccctgtttgtgaacgatgccgacggctatcctgccggactgaaaataacggctttgggagactacgataaaaactccgccggtaccaactccgatacaatcgtgctgctttccggacgaatcagactggaaatacaaatacacctgtataatcaagggcagaacgactgggaactggatggcgacatcagcaccgatttaggagaataattatataacatcattacaataaaaacaatcaacataatgagaaaaatattatggtatgcttttcttctgataccggccgttttcacgtcttgcaatttggaagacgatagcgggctcattccacaagaaaacagaaaactgactatcagcttcagtgtacaagaccctgccagcggattggctacacgtgcggccatcgcaccggaagccggggaagaaaatataaaaacgctcgatttgattttcttcgaatcaaacggtaacggtaccggcacattcaaaggctggaaagaactgacctctgcatccggctctcccttggagatgaataccgacattgtgttcgacttttcggatataggactaaaaacgacagatgcttatgatattttagctgtagccaatatgggaagcaactatctgcccacagacggttcgcaaagtatggacgactggaaaaacgccattaagaacagcaacttcaaaacagcccgggcggaagtacaggcttttatggcaggtacatccgcagatatccccgaatatattacaaaaccgatagtgagcgaagcattgcttatgagcgcttcgcttagaaaagaatcggaagatactaaaatcagcatagtattgcaacgttccgttgcccgtttcgacgtgtataactcggcggcaggatatacgcttgaatccgtttccgtatggaacggatacccttccctctttgtgtggaacggagagcctactgctttcgacaaagcggcgaaacgaattgcaagactctacggagtggagagcgaagccggtgccgacattgtaggaaaactatacgcatacgaaaactatgtacccgcccccaaacagaacgaccaggtgactacctgcctcatcatcaaagtaagaaacaagcagagcggtacggcatcgtatcaccgcgtcaatgtacacccgctggaatcgggacagtcgctcaaacgcaataatgtgtacaaacttaccgtcaattccgtaaagaaagaaggatatgccaccgaactggaagcctataaaggcgcactgacttctttaagttactccatcaactactgggatatggacagccacggcacggtgcaattcgatggtgacaacattctggccataccttccaaaaaagttctgttcacccccaatggcggcagttatgatttgggcatattcacttttggcgaagggacgttatccgtcagcaaaaaggtgctggacaacggtctgtccgccactctgaacggcaaaacactgaccgtatcggccactgcactggacaatgtaaaagaccggcgcagcggaatcgtcgaactctctttcggcaatctgaaagcgaccatagacgtggtacagttggaaggcggagacctctatctagaactgaacccgaaaaccatttcccattttggcaataccgccggtgtggctgcatctcccattgcagtaaagagttcgggagagtggagcgcaagcatctatcccccgggagccggtgctttcttctcttttgcccaaacgggttccgccgccgtaaccgattacgacagcagtaaagctgtaaacaacattattcccgtctatacccataccggcaacacaggtatcagtccgcgttatggttttatggtagtcagcttgaaagaagacccttcggtacaaggcaccatgttactgattcaggacggtgtgcccggatttacgctgacaccggatattgcttccatcgactttgaatacgacggtgaactgacaatcaccggcaacaataccaattcgttccttgtcaaccccggattgacggcagacggctcaaccgtcaacgaatgggaatacgtgcttgaaggcaacgatgcggcagtctttgaagtaaaggacacgcacgatgcgtccgatcccaagctcaaccgtatcaccgtaaaggccaaaagtcataatgaaggcaacggtatcctgaaagcccggctctatctggctttgaaagcctctcccggagtgaagtctcatgtaatcgacatcagccagcaaccaatgtcattcggtacaggagttccgggcaacacgctttacatatccgaaaatgcggacgagacccaacttataactctgcaaggcggtagcgggatgcgatggattgccgaactggaacaacccgaaccggcaacggctcatgcgtacaatataaaaatgaccggcgaaaacggtacggagatgtcttggggaagcgaatacaccatgagtaccaaattcaaggtcaattttcccaaaacactgtacaaggacgccaaccggaacatcacctataatgtaaaacttactttggccggaacggcagtaacaatccgtctggctatcgtaagaacggtgcttcagcccatagcgattaacaccgccaatctttccggtggctacggttcactcggcaacggcattttcagcacattccgcgaatacggcaattacggcacattcttcggtcctcaaggaatagtctatactccggcagtaccgactttgccgaacagcgacaataacaatgcgggagtaggcgcagacattccggacaatgtgaacattctcttctcgggaacatacacaagcagaattgcaaattattatgacaatctgcttacttggctcaagagcagtcccggcaagaacagaattaccgtaatcactcttgacaacagtgtcgcggataatcaggccttgttcaccaagatcgcctcattgggatatacctacaagagcaacagtagcatatctgcaacttgggtcggaactcattccaacgatcctgtatgggattatattgtcaaaaacggaccgttcagcaattacaagccgtcgcaatccattgacttcaccgccttgttttatagagacgggataagcggaagctttgacacgcctaccggagtaacccatgtactggaagtgcccggttacggatgttccttgtctgtcgacctgcaaaggcgaattatagttatcggcgacagccagcataccaatacctggacaccgacttatagtgcgctggcaagtaccaccgacaataaatactacggccgcggaatactatgggcttcattgtgggcaatcatttacaataccgctcagtacggagaccattttacggatgcactcaaatagttgaggatatccggttaccgcttatatacagagaagtcctcaaaaacgaagcatatcgaatccgtttttgaagacttctctcattatatcaataataaacaaagatatattctccacgagcatattgctcctttgcccgtatggccgatgccaactcatgttccggaatttagaataaagtcgtaagccaatagaatcattcttccgcctgcatcgccacaatctcctgtaacaccgacacagcctcttccacggtagtgacgtccttcaccaccatgctccgcttgccgttctgctcacgcaggtcgcaacggcgggtatatttcatcatgtaggcgatgactttgccgaaagccaggctctgatagtaagggctgtccggattggaaacaaagaacagcgtcatgcgaccgcctttaaggaacaccttttccgttcccagacgcgctgcaagacggcgtaggggaacgatgcggagcagttcctccgtttcgggcggaacaggtccgaaacggtcttcgagacgggcacggaaagcatctacgtctctgtccagcgtcaatccgtccaattcgcgatagagcagcatacgttcgctgctaccggtgacgtaggcggcgggcagcaacagttcgagatcgctttccacctggcattcgtcaacaaactgctcgccgctgatagtaccgtcgcctttcaattcatcagcatagaggtcggcaaattcgtcggtcttaagctcacgtacggcttcggacaatatcttctgataagtttcgtagcccagatcggcaataaaaccgctttgctccgcgccgagcatattacccgcaccgcggatgtcgaggtcctgcatggcaatgtggataccgctacctaaatcggagaagttctcgatggcctgcaggcggcgtttggcttcaggagtaagcgaggacaaggggggagcaagcaagtagcagaaagcctttttgttgctgcgccccacacggccgcgcatctggtgcaggtcgctcaaaccgaaattctgtgcctggttgatgatgatggtattggcgttcggtatgtcgataccgctctcgataatggtggtggcgagcaagacgtcataatcatagttgacaaaatcgagaataatcttctccagttcggcaggttccatctgtccgtgaccgatacagacacggcaatcgggaatgttgcgctctatcatcgctttcagttccgaaagattggagatacggttgtttacaaagaacacctgtccgttgcggctcatttcgaagttaatggcatcagtgataatctcatcaccgaaagtatgcacctccgtctgaatggggtaacggttgggaggcggcgtctgaataacgcttaaatcgcgcgcacccatcagggagaactgcaaagtgcggggaatgggagtggctgtcagggtcagggtatccacgtttactttcaactggcggagtttctccttgacggaaacgccgaacttctgttcctcatcgataatcagcaggccgaggtctttaaacttaacatccttacccaagatgcggtgcgtaccgataaggatattcacctctccccccgcaagacctttgacaacggatttagtctgtgccgccgtccgggcacgactcaaatattccacacggcaaggcaaacctttcagacgctccttgaaagtctggaaatgctggtaggcaaggacagtggtgggaacgagaacggcaacctgcttgttgtccgccaccgccttgaaagcggcacgtatggcaacctcggtcttgccgaatcctacatcgccacataccagccggtccatgggacgggcactttccatatctgcctttacgtcggcagtcgccttgctctggtcgggggtatcctcgtaaataaaagacgcttccagctcccgttgcaggaaactgtcgggactgtattggaagcctttctcttcgcgccgttgcgaatagagctttatcaggtcgcgggctatatccttaatcttggtcttggtacggtccttcagtttctcccacgcaccggttcccaatttgttgagacggggagcttcgccttctttgcctttgtacttggaaaccttgtgcaaagagtggatggagacaaagaccacatcgtcattctgatagaccaggcgcattacttcttgcgtagtgtctccgttgggaatacgtaccaatcccgtaaaacgccccacgccgtggtcggtatgtaccacgtaatctccaggggtaaactggttcagctccttcaggctcagggccaccttgccactgcgggctttatcgcttttcaggttgtatttatggaaacggtcgaaaagctggtggtcggtaaagatgcagagacgcaacgtatcgtcggcaaaaccctcgtgcagggtacgttcaacgggtgtgaagaagatattatctccccggtcttcaaagatagcgcggatacggtcggtctgcttcagactgtcgctgcatatatagagggtatagttgcgggaaagatagtcgcggaaactttctgccaccaagtcgaaattcttatggaagataggctgtgcaacggtactgaatgcaactgtcgcatccggcgttccggtgggcttcgtaccgaattccatgcggcggaaatcgagggcacgcaaagtaaactctcctccatcaatcaacttaccttccagagagattgcaccgttttcttcggcttcgcaggctgcaatagcctgtgcagtaagcgattcatcgtggacgacctgaatacgctcccgcaaccaaaggaaatcacgcatcgccagcaaggtatccggccgcagaaaatccaagaaagaaaccatgccgccatcccccccttgctccaagctacggcttaaatcgggaacaatgacaatctcctctttcttctctttggaaagctggctctccacttcaaaagtacgaatactctccacctcatctccaaaaaagtcgatacggaaaggaaactcggacgaaaaggaaaagacgtcgataatactgccgcgcacagcatactgccccggctcgtacacataatccacatactcgaacccatagctgcgcagcacttccgtaacaaagtccatatccaccttttcgccggcatgaagcttcaaggttttatctcccagttccttacgggatacaactttttccgccaacgcatccggataggtaactacacaaagcccttcttctcccttttgcaaacggctcagcacttccgtacggagaatctcgttagccgcatctttctggccgtactttatggcacggcggaaagaagaaggaaaaaacaacacctgtccggttcccaaaatctgtgtcaggtcgtggtagaaatatcccgcctcttccaaatcgccgaggataaagacaaacggacattccgcctgctgcaccagcacggatgaaaacagtgaagcggcagaggcgcacaaaccactgcaatagagatgacggacggaattgtcctttagcaacttgcacatgccttctacattggggtgggtggcgtataattgttgtagttcggtaataatcattgctgtcttttttagttcaccgtagattacacaaagtcacacagattaagagaatccgataatctgtgtaaactcataaatgttccataacgaatttccgttgcaaaaatacataaataatccttagttttatctgtaagtaatagaaaagcactacttttgttcccaataacaagctccatctattttcaatgaatatgcagacatcagacagtattgtcatcatccccacctacaatgaacgggaaaatatcgagaatatcatccgtgccgtttttgccctggaacacggattccacatacttgtcatcgaagacggttctcccgacggcacagccgccatcgtaaaagacttgcaacgcgaatttccccaccgcctgtttatggtggagcgtaagggaaaactgggactgggtacggcctacatagccggattcaaatgggctctgcaacgcgactaccaatatatattcgaaatggatgccgatttcagccataaccccaaagacctaccccgcctctaccgggcttgtaccgaagagggagcggatgtggccatcggctcgcgctacgtcagcggcgtgaatgtggtaaactggcctatgggacgtgtgctgatgtcttatttcgcttccaaatatgtacggtttatcacgggattgcccatacatgacactaccgccggctttgtatgctaccgccgcaaggtattgcaaaccatcaatctggacggcatccgcttcaaagggtatgctttccagatagaaatgaaattcaccgcttacaaatgcggagcgaatgtaaaggaagtgccggttatcttcatcaaccgcgaactgggaacatccaagatgaacagcagtattttcggagaagccgtgttcggagttatccggctgaaatggaacagcctgttccataaatatccagacttaaaaaactaaagatatgaaaagaacactgatacacaacgctacgattgtcaacgaaggacaaagcgtacaaggctcggtagtgatagaaaacgggcgcatcgccgaagtacttaccaactggaagcctctttccgccccttgtgaagaagtgattgatgcaacaggctgctacctgctgcccggcattatcgatgaccatgtgcattttcgtgatccgggtcttacccataaggcagatattctgacggaaagccgtgcagcggctgccggcggggtgacttccattatggacatgcccaataccaatccgctgaccgtaacgttggatgccttgaatgccaaactcgacttgctgaatgagaagtgtatcgtcaaccattcctgctacttcggagcaaccaacaacaactatacggaatttgacaagctggacaagcaccgcgtttgcggcatcaagctgttcatgggctccagtaccggtaatatgctggtggataaaatgaacagcctgctgaatatattcaacggtacggatatgctgattgccgcccattgcgaagatcaggaaacaataaaaaacaatatcgagaaatacaagcaaaaatataaaggagcggatgacattcccgtcagtgcccaccccagtatccgttccgttccggcatgttatgcctcttccgaactggctgtccgtctggcaaagattgccggagcgcgcctgcacatcctgcatgtttccacagccaaagaactgcaactgttcagtgacgaacctttggcaaacaagaacatcaccgctgaagcatgtgtagcgcatttactttttacgctgacgcactacaacagtttgggcgcacgcataaagtgtaatcctgccgttaaacgaaaaacagaccgggaagcactgcggaccgctgtcaactcaggactgattgacgttatcgccaccgaccacgcccctcacttgttgagcgagaaagagggcggggctttgaaagcaatgtccggtatgcctatgatacaattctcccttgtcagtatgttagaactggtagacgaaggagtgttctcactggaaacggttgttcagaaaatgtgtcatgcacctgcccggatatacggtatttgccagcgtggatatatccgtgaaggctatcaggcggatttagtgctggtacgccctaactctccctgggaagtcactaccgacaagattctgagcaaatgcggctggagtcctttggaagggcatacgttcaactggaaagtagaaaaaacgtttgccaacggacatcttatttacaacggcaatactgtgaacgattcttaccgcggtgaagagctgcggtttgattatccgtcggcaggagcataatatagtattatctattcagagcataaccttatatagagattatcaattgccaactatcaattataaaatccatgaagtaagcccctatatcaactggatttattttttccatgcctggggctttcaacccaagtttgcagcaatcgccaacattcacggttgcgattcctgccgcgccatgtggcttgcggcttttccgcaagaagaacgctccaaagccgcagaggctatgcaattgtttaaggaagccggcagagtactcaaccggttggatgagaaaatttcggtgcaatgtatttacaggctatgcagtgccaatgcagagggagacaatctcatcatcgaagatacggtgttccctctgctccgccagcagacacctcatccggacggaagtccgtttctctgcctgagcgatttcatacggcctctttcatccggagtgccggatacgatagggctttttgcatcttccgtcagtgcggagagcgaaggatgttataaagacgatccttataagcatcttctcgtacagaccctgacagaccggcttgccgaagccgcaacagaaaagatgcacgaatatgtgcgcaagacagtctggggatatgctcccgatgaatcgctttccattccggatttgctggttgagaaatatcagggcatccgtccggcagtaggctatccttccctacccgaccaatccgtaaactttatattggacgaattgctggatatgaaacagataggcattacgctcaccgaaaacggagccatgtatccgcatgcttctgtctgtggtcttatgttttcacatccccagtcacgctatttcgccgtaggcaagattggtgaagaccagttggaagattatgcctgccggcgcggtaaaccgattgaggaaatgcgaaagttcctggcagcaaatttaaagagttaaatgttgcaagtgtgattttccggtttctcttacgacaaacagaataaaagcgattcgagcaagcatacacaatggaaaatgtagaacaagagtttctgtccgtcatacgggaatatgagcgcgtcatctataaggtgtgttacctgtacaccactccgaacgcgactcttaatgacctgtatcaggaagtagtgctcaatatatggaaagcgtttcctaaattcagaagggaatgtaaaatctcgacgtggatttaccgtatcgccttgaatacctgtatcagcttcatacggaaagaaaagaacattccggagattgtcaccctcacccaggaagccgaccgcagcgaagaggacgacgaaacgcaagccatgttacagcaactctaccggatgataaaccggctgggacagttggagaagtctatcatcctgctttatctggaagaaaaaagctatgaagatatttccgagattaccggactgaccgtaaccaacgtggccaccaaactcaaccgtattaaagacaaactgaaaaagatgaataaggaggattaatatatggaactggacgaactgaaaaaatcatggaatgccctggatgcacagttgcaaaaggaacctattgccgatgagaaacagataaaagaactgattgcaaattataaaacaaatacccggcacagtttgggacgactcgttatcctgcaacgcttctcacttggaacaggtgcggtaggattggctgtcatcctgctggtgtggttcttactgcctaccttcggtttcaacgagcatttgcagaacaagataattctgtttctgattttcattaccgtaactattctcagcggtatgtggtgggactggaaaacctacctttggaacaagaacacccacatagacgaaatgtccgtagccgaagtgagccgacgcatgaccagattccgtaactggacccgttacgaaatatgggcagtagctgcctggaccgttatcttcaccatactgttcttctggataatggattactatacactgcctctcatgatacaagccgtcttgctcggttgctacatcatcctggatgcacttcttatttatttcatatataaaaaagtcgtttacaaacacctcgacagcattaaaaagaacatagaagaattgaaagatatatgcaccgaataactctcatacttatcttatgcctgcttttaccggacatgtacatctacttggtgtacatcgtaaagagaacacgtaacatactttggcgcagtgtgtattggcttcctacagttgtgctggtagctatatatatgtattacatctatatgacaggtgacaatgcgctttcacgccatccgcaaggcatcggcaggctggcagtgaccgtaatgctgtttgccgtccctaagacggtattcatgctttgttcgctgtttggcatattgatgcggggaatcagccgccttttgtcattcatcattttccatacgccgttcaggaatccccgttttcctttcgttgcccaccggcttccttacacacttctcggattgatattggggataatcggttttgccaatatcctttacggagccattgccggtatcacgcgctttgaggtaaagaatgtcgaatatcgctcgcccaacattcccaaaggttttgacggttaccgcgttcttcagctatcggatatacatataggcagttggttaggaaatccggaagctatccggcgtctggttacgctggtgaacgaacagcaagcggacctcattgtctttaccggtgatttagtcaatcagcaaagccacgaactggacggtttcaaagagacactttccctgcttcatgctcccgacggagtatattctatcctcggcaatcacgattacgggacatattaccgctggcataacagaaaagaggaagcagccaacttggagtatctaataggacagcaaaaagatatgggttggaaaatgctgaataacgagcattgcatcctatatcatcagggcgacagcatagcgctgataggtgttgagaacgacggcgaaccgcctttctcacaattcgccgatttatccaaagccatgcaaggcacggaaggcatgttccgtatactgctcagccataaccctacgcactggcgacgcgaagttttgcctgattcggatatagagttaaccctttccggacatacgcacgccatgcagatggaaatattcggacactcgttatcttctctcatctaccctgaatggagcggtatgtactacgaaggcaaacgcgccctatatgtaaatgtcggtataggatacgtaggtctgcctttccgcttcggtgcatggcccgaagtcaccgtcataaaattagttagcgagaaagagtgacagaatataaaaaagacctatctttgtggcaataaaatccacaacccatgaaaatactctacaatatttaccagatttgctttgcactgcctgttttattggtcctgactgtccttaccgcattggtcacaattatcggttcgttactggggggcgctcatttctggggatattatccgggtaaaatatggtcacaactgatttgctacctgctgctcatcccggtaaagataaacggacgcgagaaacttcacaaacgtacttcttatgtgtttgtcccaaaccatcagggttctttcgatattttcctgatttacggcttcttgggcagaaacttcaaatggatgatgaagaaaagcctgcgaaagattccgttcgtaggcaaagcatgcgaaagcgcgggacatatcttcgtagaccgttccagtcctaaaaaagtactggtcaccatgcgccaggcagaggcttccttaaaggatggagtatcattggtagtattccccgaaggagcacgcacattcaccggtcacatgggatacttcaagagaggagccttccaattggcagatgaactgcagctggcggtagtgcccgttaccatcgacggttcgtttgagatacttccccgcacgggcaagtggatacaccgccaccgcatgatactgacgattcatgaaccgattgcccctaagggacaaggagtggagaacatcaaggcaactatggcggaagcctatacagcagtagaaagcagccttccggagaagtttaaaggaatggttaaaaacgaagatcaagaccgttgaagtctttcatccgcactgcctacggtttattggcggaagtatcagttgaagcattttgcctgacgcgctggtgttcctcaatcaactgcatgttttccttcgcttttgaaaggaattcctttatcaactgattctgcttgaatgccaatggagcggttcgcataatatcctctatctgcggagtcatgacaggatacggtaatgtgctgcacatcatcataaacacgcttggacccaaaacattttcattgttgtcaatgatgaactgcttcacataattattcatttcttcaacaagagtttccccttctttcgccagctccttatggacatcttccaaattggctccgtccagcaccatacgcgcctctttgcggtcgagctcctctatctgcagttccagtgcattccgtttttctataaactcatacagccgatcattgagcaatgtccctttagctgccaattgcgtatttgaaatagagacttctatcttaccgtcttccagtacaagcggcataatcccttcatcgtccatatagagagttaccatcatcacagaatctacaggacctttcattgagaaaagcccatgaataacttccgcagaatcgacagctacccactgcccgttctgaagagttttaagaaacaacatttttccatcaaggcttgtcactgaagaactgccttccaccttgtattttcgggcacaagaagtgaaaaacacgagtaaaagcaaaagaggcaaaatacgatttacactcattctaatcatgcaggaaacgatttatgaattatacgtggcaaaggtattaatattccttataaacgggatagaaagaaaggaattttcatttggtttacgtatttttgcacaatcataaatataaaaaacggagaaatatacatgtcaacctatgctccttttgccaaacctctttatgtaatgctcaagcccgtaggggctgtatgcaacctggcatgcgattattgttattatctggagaagtccaaactgtatgtaaacaatccaaaacacgtgatgagcgatgaactgctggagaagttcattgaagaatatatcaattcgcaaacaatgcctcaagtattgttcacctggcacggcggagaaaccctaatgcgcccgctggccttctacaaaaaagcgatggaactgcaaaagaaatacgccaacggacggacgattgacaactgcatacaaaccaacggcacactgctcaccgacgaatggtgcgagttcttcaaagagaacaattggctggtgggcgtatctatcgacgggccgcaggagtttcatgacgaataccgtaaaaacaggcttggaagaccatcctttgtcaaagtgatgcaaggcatcaacctgctgaaaaagcacggagtagaatggaacgcgatggcggtagtaaatgacttcaacgccgactatccccttgaattctatcatttcttcaaagaaatcggttctcattatatccagttcgctcctatcgtagaacgcatcatgccgcaccaagacggacgccatctggcctcactgaccgataaggaaaaagctacggaactggcggacttctccgttagcccggaacaatggggaaacttcctctgtaccctgttcgatgaatgggtgaaacaggatgtaggtacttactatatccagctcttcgactccacccttgccaactgggtgggcgaacagccgggcgtatgttccatggcaaagacctgcggacatgccggtgtaatggaattcaacggtgatgtatatgcctgcgaccactttgtatttccggaatacaagctaggaaacatctatcagaaaacactagtggaaatgatgtacagcgaacgtcagcaagccttcggacagatgaagcaaaagtctctccccacccagtgcagggagtgcgaatggctgtttgcctgcaacggtgaatgtcctaaaaaccgctttgcacatactgccgacggcgaacccggactgaactacctgtgcgccggctaccggaaattcttcaagcatgtggctccttacatggatttcatgaagcaagagctgatgaaccagcgtccgcctgccaacatcatggatgctatccgggaaggaagattcaattaaaaatcatatcactactgtcccgtaaaagtggataaatagttctttgaaattattgaaatatagtcaattacacggttttttgaaatgaaacggacttgattttgcaactttgcagtctaatacaaatggctgctatgttccaagacaaatacgtattctctcaattaaccgcttttctgaacaggactcagttcaacaactatgttcgcaagtatgatggcaacagatatgtgaaacatttcacttgctggaatcagatgctcgcgatgatgtttggacaactgagtaaccgtgagagcctgcgagacttagtcgttgctttcgaggcgcatagggccaagcaatatcatcttggtttaggtcgtgaaccgatagccaagacaactcttgcgacagcgaaccagaaccgtgattacagaatcttcgaagactttgcattctatatgatgaaggaagcctgcgagaagcggacgaccaacatccttgacatttccggaaagaaatatgcgtttgattcaacaacgattccgttgtgtcttgcaacattcccatgggcaaagttccgaagcaagaaaggaggggtgaaagctcatgtcttatacgacattgaagcacaagttcctgccttctatactgtaactactgcatcaaagcatgattccacagcaatgtcttcaatccattatgaaccaaatgcttattatatattcgacagggcttatgactcctttaaagaactctataggatacatcttacagactctttctttgttgtcagagccaagacgaacttaaagtataagacagtcagatggaagcgaagaatgccaaagaacataatgacagatgcggaagtgaaactgaccggatatctctccgagaaaaaatatcctgagtcattcagactcgtccgatattacgacgaagaggatgaccgtgagttcacttttttgacgaatgcaaaacaactttctgcactggatgtcgccgatctttataagaaaagatggttaatcgagctgttcttcaaatggctcaagcagcatctcaagataaagaaattctggggcacaacagagaacgctgttcgcatacaaatcagtgtggctattatcacgtactgtcttgtggctattgtccaacatgatatgaagttgaaacgttcaacctatgaagttttacaaattctcagcatatcattgactgacaaaacccacttgcgtgacctgttcgacaagactaatttcaatgatgtcaaagatctaaatgatcccctgattccggggctttttgattaattgtttaactcgtcccattttaacgggacactaatgaaatcatatagtaaattaacaacaaaaaagatgaaagtaacgaagtatttgattgcggcggtcgccgtactgacagtctgctcggcacgtgcagacgaaggaatgtggttactgcaactgatgaagcagcagaactctatcgacatgatgaagaaacaaggactgaaacttgcagccgatgatttatacaacccgaacggagtatcgctgaaggatgccgtcggcatctttggcggtggttgtacgggcgaaatcatctcacccgaaggactgattctcaccaatcaccactgcggctacggtgctatccaacagcacagctcagtggaacacgattacctgacagacggtttctgggcaaaaagccgcaatgaagagttgcctactccgggattgaaattccgtttcgtacaccgcattgtagacatcaccgacctcgtaaacgcgaaagtcaaagccggagaagtgacggaagtcgatgcattgaccgccccgttcctcggcaaacttgccaaagaagaactggaaaagagtgatttgaaaggcaaaccgggcatcgaggtaagagcacttcctttctatgcgggaaataaattctacctgttctattacaaagtgtacagtgacgtacgcatggtagccgctcccccttcctcggtaggtaagttcggcggtgaaaccgacaactggatgtggccgcgccacacgggcgacttctccatgttccgcatctatgccgatgccaacggagaaccggccgaatacaatgcaagcaacgtacctttgaagactccgaaattcctgtccatttccatcaaaggactgaaagaaaacgactatgccatgattatgggattccccggcagcaccagccgttacctcacccggtcggaagtgaaagaacgcatggaagcagacaaccaggccatgattgacatgcgcggtgtccgcctcgatgtactgcgcaagtacatggatgccagcgacaaaacccgcatccagtatgccagcaaatttgccggaagcagcaactactggaaaaactccatcggcatgaacaaggcaattatcgacaacgatgtgctgggcacaaaagcgaaacaggaaaagaactttgccgaatttgccaaaggtaaaaccgaatacgagggtgtagtagagagaatcgacgaaatcattgccaagagaatgccggttacccgtcagttcaactacttgtacgaagccttgagcggcgctatcgaattcggaagcccgtacatgattatgcataagataaagacggcgctgaaagagaaaaacgactctttgcttgctgcttccaaagcacagttggaagaggtgttcaacgacatccacaacaaagactacgaccacgaagtagaccgtgccgtagccaaagccatcctgcccgctctcgcccaaaaactgcaacctgaacagttgcccgttttctaccagactatccaaagcaagtacaaaggcgactacaatgctttcgtagatgatatgtacgacaactccatccttgccaaccgcaccaacttcgacaagttcatgaagaaacctacggtaaaggctatcgaaaaagaccctgccacagcttactcccgctcgaagatagaaaagctgaaagccgtttccatagaagaaaaggcactgagcaacggtcttgagttgctgcataaagcatacatccgcggactgggcgagatgaaactgcccgtaccctcttatccggacgccaacttcacgctccgtctgacctacggcaatgtgaaagcatacagcccgcgcgatgccatacactacaattactacaccaccacggacggcattcttgaaaaagaaaaccccgaagaccgcgaattcgtagtgcccgccaaactgaaggagcttatcctcaataaagacttcggacgctatgccatggccgacggcacaatgcccgtttgcttcctgactaccaacgacatcaccggcggtaactccggcagtcccgtcatcaacggtgaaggacagcttatcggctgtgcattcgacggcaactgggaatccttgagcggtgacatcaacttcgacaacaacctgcaacgttgcatcgcactggacatccgctatgtactcttcattctggaaaaactgggagactgcggacatctgataaaagaaatgaacatcatcgaataatgggaacccatccccaaaagggtatgaaagtgaatggcattcggtcgtatactgaatgccattcactcgtatactgaattctatttagtcgtatattgaatttccctctctcagaacaccttctaacgcatagttacatgagacgaatcatattatcattattccttacatccggcatcctttcggcacacgccgacgaaggaatgtggatgcttaccgacctcaaacagcagaacgaggttgccatgacagagctcggcctgcttatccctgccgaacagatatacaaccccaacagcatagccctgaaagatgcggtagtgcatttcggcggcggttgcacgggtgaggttatctcggcagaagggctggtactgaccaatcatcactgcggctatggagccatccagcaacacagcagcgtggagcacgattacctgaccgatggtttttgggcaatgtcccgcagcgaggagctaccctgcaagggacttactgtgacctacatcgacgagataatggacgtgacggactacgtaagcgaccagttgcagatagactctgacccaaacggcacaaattacctctcgcccaaataccttgccatgatagccgaccgtttcctgtccgcgcaaggcatcacgctgacatccggccgtaaagcagaactgaaagcattctacggcggaaacaaatattacttgttcctaaagacaacctacagcgatatccgcatggtaggtgctcctccctcttccatcggcaagttcggagccgatacggacaactggatgtggccgcgccacacgggcgacttctccttattccgcatctacgccggcaaggacggccaaccctccgcttacaaccccgacaatgtgcccttgcaggtaaagaagcacctcaccatcagcctcgccggctatcgtgaaggcgacttcacgtttgtcatgggatttcccggacgcaactggcgctacatgatttccgacgaagtggaagaacgtatgcaaaccaccaacttcatgcgccaccacgtgcgtgacatccgccagaaagccctcatggagcaaatgctgaaagacgatgccgtgcgcatccactatgcaagtaaatacgcctcatccgctaattactggaagaatgccatcggcatgaacgaagggcttgtccgcctgaaaatactagatacgaaacgcgcacagcaggaacagctccttgcacgcggccgtgccctgaacgacagttcttatcaaaaggctttcgaccaaatacgcggcatcgtgaagcatcgccgcaatgctctctatcatcagcaggccattcaggaagcattggttacgggactcgacttcatgcggattccgagtaccgccgccctggtttctgccctgaaaagcaaggataaaacccggataaaaaccgccgccgacagtctgcaagttgccgccgacaagtattttgcgtccgtccccttccccgaagtggagcgaattgtagggaagaagatgctgcaaacctacatgaaatacattcctgccgaacagcgcatcggtattttcaaagttatcgacaagcgtttcaagggagacagcgatgcctttatcgatgcctgcttcgaatattccatcttcggcagcaaggagaatttcgccaagttcatccgcaaacccagcttgtataagattggcaacgactggatgacactgctcaaatactccatcaccgacggtctgttgcaaactaccattgccatgatggatgccaaccgcaactataatgccgctcacaaggtatgggtaaaaggcatgatggacatgaagcgggaagccggcacacctatatatcccgatgccaactccaccctgcgcctgacctatggacgcgtattgccgtataaacctgccgacggtgtggaatacggatattacaccaccctaaagggggcaatggaaaaggaagaccccgacaattgggagtttgtggtgcctgccaaactgaaacaattgtaccagacaaaagatttcggacgatatgccatgcccgacggcgagatgcccgtatgcttcatcgtgaacacggacaatacgggcggaaactccggcagcccggtgttcaatgccaaaggcgaactgataggtacggctttcgaccgcaactacgagggtctgacgggtgacatcgctttccgtccatcttcgcaacgtgccgcctgtgtggatatccgctatacgttgtttatcatagacaagtatgccggtgcttcgcacatcatcaaggagctgacgattagcgaagcggaaccggacatgacaaaaagtaattagttattactaatttacaattgacggcgaacaatttcttcgtttatccgttatatattcataaactatatataagacaaagattatggagaaatttgaagaattaatacaatcggaaaaacctgttttagtagacttttttgctacctggtgcggaccttgtaaagccatgcaccccgtgctggaagcattgaaaggcgaaatcggcgacagagcgcgtattgcaaaaatcgatgtagaccagcatgaagaattggctgcaagctatcgtatacagatggttcctacctttatcctgttcagaaagggtgaagctttgtggcgtcattcgggggtaatcagcggtaaggaacttaaagccattatcgaacaaaactcataattaagaaacatgaagaaaatcataaccatggcggttctcatcttctcaagcatgctgacttatgcttgcaccggtggagccgaacagaaacaagctgaaacgcaaaagactgcccaggagggtagcgtaatcgtaatgaacaaagccatgttcatcaaggatatattcgattacgagaagtccaaagagtggaaatataaaggcgacaaacccgccatcatcgacttatatgccgactggtgcggaccttgccggatgacagcgcctattatgaaggaactggcgaaagaatatgccgggaaaatcgtaatatacaaagtcaatgtggataaggagaaagaactggcagccttgttcaacgccaccagtattcctctgtttgtctttattccgatgcagggcgaaccccagttattccgcggagctgccgataaggcaacctacaaaaaggctatcgatgagttcctgttgaagaaataacagcatatacaagtaaagagaatatgcccaaatagagaatgctcactgtgtgctttttttaggcacgggaaatcgaaatctgtgtaatccctgcctaaaaagagcatcaggtgcacgtcttaatacaatttttgaggaacaaactaccgggtttctgttttacaggattcttataatactatcggcatctcctgccataccccgttgtacatctccatcacagtttcataccctgcctgctttaatgcccgcaatgcttccgggcgaccgctgttaatccgctccggatagtgagagtcgctattgacctgaacgcggatacccaaaccacgcaataacgggaaataacgtccgttgggatagaaagtgcccaaatcatggtaagacttggtattgatttccacctgatagcctcgtgcggcaatgtcttcaaaatactctttcacgagcgtatcataccaaacctcgtcgagcagaccgggacgatagcaagcagcattatagtgcatcttgtccgcatgtcccactacatcgaacccgcccaactccagcatacgcctcaaccgtccgtagtacaagcgcaccacctgctccaagtcgccgccaaactgcttatctactatctgcctgaaaacatcggccggaacatccacatccaccacttcgccccgttcattatacagcatgtgcacggaaccgatgcgataatccagcggcagttcacgaaaacgggcagcagacggattgctctcttcatttaaataatctatttccaagccgagataaagttctatctttccggcatacttttcctttatccgatgaaattcggcctgatagtcgttcatacggtcccactccatagtccatgccgtagaaaaaggcaacggggcatgggatgaaaagccatacgaagtaaatccctcgctcaaggcaaaccgcacgaaatcttccatgctggcacgtccgtcacaatacaggctgtgactatgatagttcgtcagattcttgcttctgctcattctcgtatattttagttagattcttaattccggcgcctcatcagtctgccgataaaaaccggagctagttctcagttcgactctatctcgctcagttccagccagcgcatggtcttttcatcaatcaagtccgtcagttccggcaagcgttttgacttctccgtcaattcctctacggatagcgcaccgctgcacaacgcctcttcaatggattgcttttcggcttccaatgccgcaatctcctgttcgagttgttcaaattcgcgcttctccttgaaagacatacggcgcttttcattcagacgcactttcgcagtcttttcttcctgagttttagccgcttctttttccttttccttctcttgggcggctttcacatccttccagtcacgatactgcgtatagttgccggggaaatcgcggatgtctccctgcccgttaaacaccagcaagtggtccaccaccttatccatgaagtagcggtcgtggctcaccacaatcacacatcccttgaagttctgcaagtactcttccaatacgttcagcgtaacgatgtccaagtcgttggtaggctcgtccagaaccaggaaattaggattgcgcatcagcaccgtacacagatagagacggcggcgctcgccaccgctcagcttatagacatagctgtgctgcgtttcaggcgtaaagaggaaatgttgcaaaaactgcgatgccgtcagacgcttgccgttacccagctctatcacttccgcgatgtcctgcaccacatcgatgactttcatctgctcgtcaaattgcaaaccctcctgcgaataatagccgaaacggacggtttcgccgatgtccagcgtaccactatccgccaactcctgtcccatcagtatcttgatgaaggtggactttcccgtaccgttattccccacgatgcccatcttctcatagcgggcgaagatgtaggagaaatcatccagtatcttcaagtcgccaaaggacttatagaggtggtctgcctcgaatatcttgctgccaatataggatgcctttacatccagctttacattgtcgttattgaaacgttgcttggctaccttctccaattcataaaaagcatcttcccggtaacgtgccttatgccctctggcttgcggcatacgccgcatccattcaagctccgtacgatacaggttattggcgcgttctatctctacggtcttggcctcgatgcgctcttcgcgtttttccagataatagctgtaattgcccttgtactgatatatacagcggttgtctatctcgataatctccgagcagacgcggtcgaggaagtagcggtcgtgcgtcaccatcagcaaagtgaggttggtacggcgcagataatcttccagccattcggtcatatccaggtcgaggtggttggtaggctcatccaatataaggagatcgggttcggtgataagcgtattggcaagtgccacacgtttcaattgtccgccggacagagacttcacctgctgattgaaatcgcggattttgagttgggaaagaatttgtttggctttctgctcatactcccaggccttctcatggtccatgcgcaccagaatttcatccaaaccgggatgcccttccgtctccatgcaacgttcatactcctttatcagctctacggtactgttgccatgatgaaaacatgcttccaacacagtcagctcttccggatattgagggtcttgttccagatagccgacacgtatatcacgtctgaaagagattgtaccgccgtcatagccttcttttccggaaaggatattaagcagtgtggacttgccgctgccattcttggcaataagccccacccgttgcccttcggacaaaccaaaggatatattttcgaatagtaccaagtcgccaaacgacttagtcaggttttccacttgaaggattgaatttactgctgccaaaacttattaaattgagagttgagaattaaaattgagaaattgccatgcagacggcaatatgaatcgggcaatggcttgtcatgaaagtaaattccggtaaacctctgcaagattgcagggctctccggctttgactttgctccataccaatttcatcgggtctatcacggtatcgcccgcaacactcgtcagaacaggggcttcacgattgccgtcgataagcgtacgccattccaagccgtctacttcattagccaaaatcacgcaaagtgtaatacccagcgacaaccatacctcttttttcttggcgcctatgctgccgctgtctatgacctgctgcatattggctatatcttcttcctgtccctggaagtctttcttcaactgctcttttacagtggtacacacccactcgtatgcttcgtttatccggtaaatttccgataggcgcaccggaattatctctgccggatatttttggccggcccgacggacttccaatgaagctatgatgctttcggcctctgccaccggctctcccttacgcaccgtaaacgagcattcaaaagcaacatcgtctatcccagctatccagagatgggaagtgtagtatgttccttcttcctcgaacatttccttactgtacgcacaatccagacgacctattttcacaagtgtggccgaagtattctctttgagttcctgcttaacggattccctgccgtatgcagtatctcccttataagccgatatacggaaattaccggtccactcgttaggattataaaacaggaaagagccttccccgtcttcaaattcgttccagtctgccggataaaccatagagaaccatgctcccggagaaatgtatttcttaccttgtttcatacttcattgactaaatgggttctttcttgcaaaagtaacattaccgctgttgatatgcaaacaaacccaacaaaaaacagccgattctcacgaaccgactgttccaatcatcatctatgaatgaagactgtttaggtctccaatattttaatatatcttataaatccatatttcgagtgcaaagataatcaatgaaataatatgtgcatcaagattttaagatatttaaattaacattctataaactaataaggttatgacctacttaatgtaaccgtaatactcattatctgtcgcacaatcccaccaaaccggacacgaccaaatcgggtctgtcatggcttgcttgttggatgcctttagctgagtcagattatagttgctctcatgagtactttggctgaaacgacggaaccaataagtaggctcattcttagaagtacctacaatcttgctgacagccgtgaaatcctgcggacggtcgtaatccacatagtcataatccaaacggcgcatatcattccaattttcggtattgatacccaatgcgataatcttctgacgcataatctcgaacaaggtcagactggcagcattctgacatacggaagaacttgccatataagtactgatttcaccttcatccatcggcttctgatccggattctttgttccttcggcttcccatgatttcaatttagcctgcatacggtcaaagtttgcctttatgcctttttgataggcatccaatgcaccatcggtatctcctttgcggaaaaggacttccgccttgataaagcacatttccgaataagtaagaatatcggaatctgaattaggacgtgcatagaatgtacccgtaccgcccacatagtctgatttcgcatcggtatagtaatacatatccgtagtgtttcgcccgctattggccataccgttagaacgtaaatttacataaatagtatcacctgcacgcttataatccttattattgcaatatgcagcccccttttgataaagcacggtcacattgttgccgtcgaccgttgtctggtgtatggcctgagcatcagcaataaatttcgtctttgtttcattatccgctttggataaatcataagttatcataaatccgcctttttccttattataaccggtttctccacccgttacaaacaaagcagctaccggaccgccttctgcgcgtgtagtggaatgtatcacatccaccccggcatcacgaatccattcattagccgttattttaccatcagcattcagtttcacatttgtcatcatggcaggaacaagctttgacaaacgagggtcttccgcacccgaaccacctgtaaatttattagtcaacagattaacataccagcgcgtcagacgttgtgtcgaaccatatccggtacaatcccaaataacggaagcctgataagggtcgctcaccgtaaaattaacctcatccccttccacattataatgtttcataatggtgttgtcatcattcgattgaggagcagagttcaatgccgtcaaaatagcctccggatcatacaaatcctctttcttggataatttcagcaaataacgggctttcagaccgtaacataatttcagccacctggaaacctctccgccattccataaatcgcctgcactcaatgcgggagccgtggtgttctgctgcttgccaaaattctcgatagctttgtccagataccccatacagagttcatacatggttttaccgtcatcataggccggattggtcttaccggtaaacgcttcctgaacaggcagctcgccatgcaagtcgagcatcatcataaatcccatcgccttaatgcaataagctgcaccttcataatgataagctccttccgcttccgccttctctatcaaaggatcgatattcacacctgcacccagataaaaattctgataaatagtggtacatgaactttgggcaggattccatgatgacaagaggctgttagcagccgtgccgccagtctgtgtcatgataccggcaattgtattggtacgcatactggctgtaccccatgcgtaagcataatagttctgtatccacggcaggcgaagctgcggtgatacggtttcggaaaccggattatccggatctgtattcacatccaggtagtcctcgcaagaagacatgccgaacacaagcgccaagccaagtgcaatatgtattagtttcttcatactcttatctttttaaatctgttattagaatgtaagattaatgccaaacgacatgccggctgtggccggaacaccgcaatagtcgatacctgcagaaccggaaccacctgtaccggaacctgaaacgcatgtttcaggatccatacccttgtagtttgtccaaacaaacagattagttcccgtaattgtagcagtcagccccttgattatattttgtttcttcaacaaatccttgaaatcgtaggacaaggaaatagaacgcaaacgcagccaattggtgtcagttataaagttataggcgttcttggcataattcttataatactcctgaatcatatacttgccggaacgggtagagttaccaacctgataagtttcattggcattataggtaattgttttggtttcataagacggttttgcagcagtacccgtattgacaacacccgtaaatgatacggattctctgtttattgtctttgtgctcaatcctttcgtcacgagatagtattcggtcccattatagatgtcacctcccagacggatatcgaacaagaaagaaaggttgaaattcttatagctgaaactattattaaaaccacctatcagcttcggttcacggttacccacaatattggtttcaacttgcgtatccttatacaaacctgtagacgggtcgataacattgtacatcttgccgtcgggcccttgagccgtttcatacttattacccgtcaatcccaaaaaataaccgccattgggtattgaaccggctttggctgcaccgacctgcgcatccgtcacatagaaaatatccacaccgtcgataaaatctcccaatcgtccacggttaccggaaagattcaatgtcgtttcccattggaagtctttcgttacaataggtttacctgtaatcgagagctccatacccttattttctaccgaaccgccattcagcgtaaggaaaatgtatcccgtagactgtgccaaacgcggtgcacaaatctggtctttcgtcttgctttgatagtaagtatagtcaaagcccaaacgtccgttgaagaaacgcatttccaaacccaattcataagaatcctgtatttcaggtttcaaaccgacactaccgcctgtccaactgttgcccataccatatttgccaccgttcagcgtagctaccggccacatatagtatcccaaagaataggcatcggcatctttacctacccgtgcccatgaaccgcggatcttaccgaatgaaagtacgttgttcttcggcagcagttcggtaaacacaaacgaaccgcttacggaaggataaaaataagaacggttattcaccggcaatgtagaagaccagtcgttacgtccggtcactgtcagataaacaagattcttgtacgaagcacggaattcaccgtaaaggcctaccatgcgtttgcgtaccgtactctctttgaaatactggttggctttaataatattgttgaaactgtaaagcccttccgttacaaaattatatccccaacgggtgttattcgttgtcttcgtagcttctgtagtagtacctaccagaagattcaaatcaaaatcaccgaaagtcttatggaagttagacatcacattcgtagtaatgtattggtaattcacatcacctttggacatataaccgttctgatatatctgcttgaccgcaccacccggacgccgaagcgtattggaactggtagtgtacttatcaatacccgcacgtgcggaaacatcccaccagtctgtcagtttgaggcttgcgttgactgcacccgtaaaacgggatgtttcgtccgtcaaagtatttttattcagaatccaatacggattttcaacatcatcctccaaatcctgcaaaccctccaatatgcggtatttactaccatcatcattcagatagcgactcatctgatcgtcgacaggccatccgtaaacagcggtcattgcaccgttaccgccctgtccgtacaaacctgcactggtcagtgtcttatcagtacttgcctgcgaataagaaacgttggctcctactgtcaggatgccgtatttctgttcaccattaaagcggaaagtcgtcttgtcataaccagttgtagggataatgccggactgatgataattggaaccggataaatagaaagaaccgttcttactaccgccggacacacttacactattatcccaaacactacttccttgaaagaaatcatctatattatcataagccataccatcaatctgatctccccaggaatccatcgtcttatcaataaaagcaccggaagtgttatattctccacggccatacagtttttgaacttccggtaatttattagcccatgaataggtatatttactgcttacattcacccttacagcaccctcttcacctttcttggtcgtaatgataataacgccattagcagcacgggagccatacagagcagcagccgcagcacctttcaacacggacatgctttcaatgtcttcagggttaatatccattacacggttgctgaaagtagttgcagttttcgtcatgccatccgtaccggaattaccggtatttactgtagagttatcatagataataccgtctacaacaaataagggctggttatcacgagattcgctggcagagttaccgccacgaattacaatattggaaccggcacccgcagcaccacctgcctgcgtaatattcacaccggggattttaccagccaaagagtttactacattcgtttgcttgttcttcatcaactctttggaattaatatccgaaacagaataacctaacgcctttttctctttcttaatgcccatagccgttacaacaacttcactcaatgactgggtatcatctttcagggtaaccgtatagtcgcttgccgctcctaccttcacttcttccgtagcatatccaacaaatgagactaccaatgtgctacccactggagcttctaccgagaattttccatcgatgtcagtaacagaacctgtactggaacctttcaccaatacactggctccaataatcggttcgcctgcaacatccactactttacctgtgattgttttggcttgctgagtactttgggaacttagtgcattatcagcagcaacaaccgaatatggcacagacatcccaagcaatgcaagcaacactaatgataagcaataatttcttttcataagctcttttttatttggatttatttgcaaatttataaattaattcagcaaatcaaagagagatgtatttaaaatatattaaataaatattaatatatttgcttttataattttaaaatattggcaaatataaaacaataaacattattatttcttatcagataagtagcgtatataataaatggctacacgtttattatcattctgttaattcttttatcacatttttggaaaatagaaaattgctgaaaaagcggcagtattattaacaatcaaaaacaaacatttatatccacaaaatacataaaataaaaaaaatattaaaacagaagtgcaagcaattagaaaacgtgagtgattggaaacaaagttcccaaagtactatttaatcttataaactattcaacctttactattttcctataggttgtatccgccttcttacatccttggatatttccaaaaacatataattcaatctgccggaatgaatgcccttttcattctctttatatttccgacttgcatactctttagacttatcaaaggttatacgggacatctgattctgcgtttttcccaccatagtagaatccagccgttcatcaggaaagaaatcgtccaaatccacatccccaatcatggtggtctcaagaaatttcatatctttatgatttgcatcagtataataaccaacaaacatatgtccgggtgtacgtaccagtatcggctcgatatttatggcacgcagcaaagaagcaaacaaaacactcccatccacacaattaatttgcgacgactccaaggcatcatcgaatgtacgaacacgttgagagaaaaccacattgctggacaggcttgtattagaaaccgaactataccgaaaattacgtttctgcaaaacattccacaaggcataaacctgattatcgacagcctcaggactaccctgataaccgaggaaacgattcacaatacgagtattcaatgcttcccgcagcaaatggtctatcataggattttcttcattgacataagcagcaaagaatattccggtatcatgaaatctcgtacctcccgtaacataccccaataaacactcattgatactgcgcaccgaaaaagtacgtacccgctgccccaactctttcctattcatctctaccgtaacggcaacgctaatcggctccgcctgattattattcttcaaggcttcatagttccagataatatcgggatagattgtatactcggtacgtggccttgccaatacaaactccgaaacggaacgggaaaagaaaggggtttccgcaacttctatcctcacccggctataagcctttgccgaccggactttcacagcgatacaagattttgggtttcccacaaacatcgaatcagccggcacaatcacctgggcatctgtcgttgcaacagacaaaatgctggaaggaaaaatattcccacccaattcatccgttatctcaaaaccggaacggaaaggagcaacgttcaaccaaatcgaaccaatgattacaacagccaatacagccactattaacggcatacgccacttagattgtccccacctctttatatccattaattctttcatatagaaaccctttttaaaacaatacaaagataatacttaattagttgccagagagattttgtaatcgcaatgtaatacttgtttcattccatcgtaacaaaaacgccgcaattttgtcgaagaaaagaaataaagtttaactttgtaataaagagactctgtacgtctctcattacattaattcagaaatacaatgaacgaatatcggattttagtagtagacgacgaagaagatttatgcgaaatcttaaagttcaaccttgagaatgaaggctacgaagtagataccgcaaactctgccgaagatgccttgaaaatggacatcagtacttacgacctgctattactggacgtgatgatgggggaaatttccggattcaaaatggcaagtatgctaaagaaagaaaagaaaacggccaagattcctatcatctttatcacagccaaagacaccgaaaatgatacggtaaccggatttaatataggagcagacgactatatctccaagcctttctccttacgcgaagtagcagcacgcgttaaagccgtattacgccgtacccggcaaactgaaacggagcgtgcacctgaacaaatcgcctataaatcattagtgcttgatatcatcaaaaagaaagtaagcatagacggagaggaagcccccctcaccaaaaaagagtttgaaatactgctcttgctactgcaaaacaaaggacgcgtattttcccgcgaagacatattgagccgcatctggagtgacgaagtatatgtgttggaccgcactatagacgtaaacatcacccgcctgcgcaaaaagataggaatatatggcaaatgtattgtaactcgcttaggatatggttattgcttcgaagccgaataatgacagacatttcctgtcattcagccggaagttatttctttcggtaatctcattatttcttgtctttgcagcctgttttattgcttatcaatatcaacgggagaaagagtataaagtagaactgctcgacacgcaactccaagactataacgaacgcctgcaacaggagctgcgaagtattccggacagtctatggacatctactttaaaccggtatatagccaaaggttcatacagagaccttcgtgtcactatcgtaaatttacaaggccgcgtcctttatgacagttacaatgaaacttcccaagaagcattcagcaatcacattaatcgtcaggaagtccaaaaagcattaaagaacggcaaaggatatgatttaaggcgcacctccgaaacaacaggcataccctatttctattcggcaactctctatccccagtatatcattcgctcggcattaccctatgatgtaaacctggtaaatagtctggctgccgatccgcattacctctggtttacagctattgttactttattgctgatattcgttttctataagtttacatccaaactgggtacggcaatcaaccatctgcgggaatttgccaaacgcgccgataaaaacgaaccggtggaaaccgatatacaatctgctttcccgcataatgaacttggcgaaatatcccagcacattatacagatatataaacgtttgcgggaaaccaaagaagcgttatatatcgaacgtgagaaactgattacacacctacagacttctcgtgaaggattgggtgtatttactaaagacaaaaaagaaatcttagtcaataacctctttacacaatacggcaatttaatctccgattccaacttgcaaactaccgaggagatattttccatttacgaatttcaaaaaatcaccgattttatcagtaaggcacaaagaagaccttcggataaagaagagaagcgtctctccatcaacatcaataaaaacgggcgcatattcattgtagaatgtatcatttttcaggatctgagttttgaaatatccattaatgacatcacacaggaagaagaacaagtacgtttgaaacgccaactgacacagaacattgcacatgaactgaaaacccctgtaagcagtattcaagggtatctggaaacaattgtcagcaatgaaagcatcccccgcgaaaagatgcagactttccttgaacggtgttatgcccaaagcaaccggctgagccgtctattacgggatatctccgtactgacacgtatggatgaagcagccaacatgattgatatggagaaagtagacatcagcatgcttgtcaccaatatagtcaacgaagtatcattggaactggaagaaaagcatattacggtagtcaacggtctacatcccaaaatacaattaaagggtaactattcattactctactccatattccgtaacctcatggataacgccatggcttatgcaggaaccaatatctacatcaacatcaactgtttccgtgaggatgagaacttctattatttcagttttgcagataccggagtaggcgtttcaccagaacatctgaatcgtttgttcgaacgcttttatcgtgtagacaaaggacgttcgcgaaaattaggtggtacaggcttagggcttgccatcgtaaaaaatgccgtcatcattcatggcggaacaatctccgccaagaataatcaaggtggcggactggaattcgtttttacgttggcaaaggagaaataatttcttttattcattttggtttgttacttttttcattatctttgcgatgcattggtttgccgccttttttcaaaggaagcgattaaaagggaatcaggtgcaagtcctgaacagtcccgctgctgtaagtttcacataatgttgcagacaatgaattctctctccatgccactggaaacgttttccgggaaggcagcctgcaacagaaacaagtcagaagacctgccatgcattatcttatcattgctttcgaggaaaaagcgttgagtctaatgaacgggataaattctatccaatcatttcattcatcaaaactctttcaaagaaagtaaaagagaataaactctgccaagtttatttaaatgatgtccggccgaagtgattcgcccggacatttgttttacagaaagtcatcaaaaacattgttcatcatctataaaatcattatattcggcacataaaacacaaaaacggatttatccgttgacctattgtctaacttataaaaaataatctatggaattaccatttgccgaatcatggaaaatcaaaatggtggaacctattcgtaaaagtacccgccaggagcgtgaacagtggttgaaagaagcccattacaatgtttttcaactaaaatcagaacaagtttatatcgatcttatcaccgattcgggaacaggagccatgagcgaccggcaatgggccggtatcatgctcggagacgaaagctatgccggggcttcttctttcttcaaattaaaagaagtcattacccgcctgaccggttttgaatatgtcattcctacacatcagggacgtgctgccgaaaatgtactattctcttatctggttcatgaaggagatattatcccgggaaattctcattttgatactaccaaaggacatatcgaaagccgaaaggcaatcgcactggactgtacaatagacgaagcacggcaaacgcaactggaaattccctttaagggcaacgtagatcctgcaaagctggaaaaagcattacaagaacatcacagccgcataccatttatcattgttaccattaccaataacacagccggcgggcaacctgtttccatgcaaaatttacgggaagtccggaatattgccgataaatacaataaacctgtcatattcgactccgcccgttttgccgaaaatgcctatttcataaagacacgtgaagaaggttaccaagataagagcataaaggaaataaccaaagagatgtttgcccttgcagacggtatgacaatgagcgccaaaaaagacggcatcgtaaatatgggaggatttattgcaacccgccgacaagactggtatgaaggagcaaaaggattctgcgtacaattcgagggttaccttacttatggcggtatgaatggtcgagatatgaatgcacttgccatcggcttggatgaaaacaccgaatttaataatcttgaaacccgtattcgccagatagaatatctggctaaaaaattagatgaatacggaataccgtaccaacgtcccgccggaggacatgcaatttttgtagatgctcccaaagttttaacacatgttcctaaagaagagtttcctgcacagactttaaccgtcgagctatatctggaagccggcatacgcggatgtgaaatcggttatttacttgccgaccgtgatcccgttacccgtgaaaaccgcttcaacggactggatttactccggctggctattccacgccgcgtgtataccgataaccacatgaatgtaatagccgctgcgctcaaaaatgtatatgacagacgcgaaacaattacaagaggagtacgtattacttgggaagctccgttaatgcgtcactttacagtacaattggaaaggctgtaactacaaactcaatgtcaggacaaagtctgaaaacaaatagtagtaaatttgaaaaatctgtttctccgccgtacggtattcggcggcggagaacacaccttgttcgtcaggcgtaaaaggcattacatgcaaatgttcccgaaaatcgacatcggaagcgttcatacatttaaacatgatttcttttgcagaccagtgaagcaacaacgaccaggtttccgtacctttgaataaggattttttttcatcttcacgcataaacttatgcgccactttccgtacccgctcgctataacactcaatatcaatcccgactcttttccccggttcacctaacaggaccgctacataacctttggtatgtgaaatactgatggaaaaagagccgtctgccaaatagggtccgccattggaataatagtgtatttctttctcttcgccaagcattgtatataataatacacgcacagtcagccactccaacttacgagaaacggctgtaaattttccaatgccctcttcatatttttctttatgaggaagtaaagcaagcagttcttccaaactttcacttgctttccagataccccacttatatgaactctctgtatattgtttaaaaacaggcattacttctctgtttctgaaccctcccgtaccggttcatttattgtaaatttcacctttaagatgcggcggttatccatctcaagaacctcaaattcataataattataagttactttctcgtgaagcgccggaaattcccctttcaactcaagtaaaagccccgctaaagtatcggcatcacctgccacttcatcaaaagtttcttcatctatcttggttatcttatagaaatccgtcagttgtgttttagcctcaaacacccatgtgtggtcattgagtacggcataagtacgttcttcatcatcgtattcgtcacgaatctccccaacaatctcttcaataatatcttccattgtaacaatacccgatgtccctccgaattcatccaccacaatagcgatatgaatcttgtttgcctgaaaatcacgcagcaaatcatcaatcatcttggtttccggaacaaaataagccggacgaatcaatgattgccaacggaaattatctcctttattcaaatgaggaagcaaatccttgatataaagcaccccttttatattgtcacgtgtttccgcataaacaggaatacgcgaataagcgttctccacgatgcactttaacacatccttaaaagaagtgcgaatttccaagtcaaccacatccagacgcgatgtcatgacttccttagccgtctcacctccaaaacgaatgataccctccaagatattgttttcttccgaaagctcggctttatccgtcaactccaacgcatgagaaagttcgtctactgaaatattatgattcttacgcacaaaatgcttattaagaaacgatgtagaacgcaccaatatcgacgacaacggatagaatatggaacgacatgccagaatgccgggagctgcaaaacggcaaaatgccaatgttttttgcgctgaataaatcttcggcataatctcaccgaaaagcagcaacagaaaagtcaatacaaccgttaggattaaaaactccgcaataaccgaatgaaattggaatacattcataaaaaagaaattacagagcatgataatggtcacattcacgaaattgttcgtaatcagtatcgtggccagcagtcgttctgtatcatccaacaaatttctgattttctcatcagaaggatgtttcccctcttcaatagaattcaaatcggacggcgagagtgaaaaaaatgcaatttcggaagccgaagcaaaaccggaagcaagcaaaagcacaccagccaatacaatagctataatagccgaaacagaaggagtatgtacggttatactgttaaaaatatctgccaattggcataaataagcgtctgggtccaaagattttggttttagttaaacaattagaacggtaaatcgtccgttggattattttgtgcaggagcagcctgcgagtgtgttgactgtacaggagcagccgtttgtccggatatacctgcctgcggtgtagttccgggcgctgcgcttcttgcagacagcatttccatgttatctacaaaaatctccgttacatagcgttttgcaccggtctgatcatcatacgaacgggtccgtattttaccctccacataaagtttgtctcctttatgcacatatttctcagccgtttctgccagtccgcgccaaaggacaagattatgccactccgtacgttcaggaacttgcgttccgtttgccaatgtataggcacggtctgaagtagccaaggggaaagtagcaacagccacaccggtatcgagatacctcacctcggggtctctgcctacatttcctaataatatcactttatttactgacatacgctttcaattttaaaatttgttgccaaaattagcgagaataacaacatcatgcaagaatacagccaacttttataaatacttctccaaaaaagcatgtaccaagcgagataccggatactgctccaaatcttccattctgatacactggtattccgaaaaagaacgggagttctccggcaaaacgacttcataaaagttagcgtatatcacccgatgggacagcacatgtttcacatttcgaaacaccaaacgtacttccggtacctctccttccgctataagtgagcgaaaggatgccgatgataaaaattcctcttccgatagatttctatccgcttcaaccaatggcaattcaaacaggtttttccaaatatcatcagccgttcgtttatgtataaaggtacacgcgcccatgcgtacatatatataattaaaataacggttggacgtctttgttctatgttgcttcacgggaagttgcataacctgcccttttgataaggcggaacaactatccgccaaaggacaaaacatacagttaggagactgtggcgtacactgaatagccccaaaatccattatagcttgattataagcagccgggcgggatttatcgagcatttcatcagctaaagcagcaaagagcttctttccttccgtagagtcaataggcacatcaatgccgcaataacgggaaagcactcgatacacatttccgtccactactgcatagggcatattataggctatggaacaaatggcggcagccgtataatcccctacccccttcaaagcccgcacttcctgatagctttccggaaacttaccgttcatactcttagctgcagcatgcagattacgggcacgagaataataccccaatccctgccaatacttcaagacctcgtcttccgaagccgaagccaaagttctcacatcaggaaaacggcggataaaacgaagaaaatactcatatccttgtaccactctcgtctgctgcaaaataatctcagaaatccatatccggtagggatcagtagtgcctctccaaggcaaatcacgtttattatccgcgtaccaatccaataaagcttcagtcaatctattcatatatagtttcatacctcaaaaggacacacatcctttttcaaaagaacaaaaatacagtttttcaatctaacaaaacctaatgctttgacttttttcaaaaaatgtccaaaatatattttttagagccgccaaaaagctatatatttgcagtccaaaaaattagaaaactatagtaataatattttttttaagaaaaaaatgactaaagctgatattgtaaacgaaattacaaagaacaccggaatcgacaaagtaacagtgcttgcaaccgttgaagcgttcatggacgcagtgaaggcatctttatctaaagatgaaaatgtttatctccgcgggtttggtagttttgtagtaaagaaaagagctcaaaaaacagctcgtaacatctcaaagaacactactatcatcattccggaacacaacattccggcttttaaacctgctaagacattcaccattgctgtgaaaaaataataaacaattagtattaacccataaaattttgaagctatgccaagcggaaagaagaaaaaaagacataaaatgtctacgcacaagcgtaaaaaaagactaagaaagaacagacataaaagcaaaaagtaatttttagtctgaaggacaaaataaagaacaaacttgtgaagctaattgtctcgcgggtttgttctttgtttaagtatcaaaccggttcgtcaatgtaaaaaagattgatgtaccggtaaatctgaacagaaaacatctgtataacaaaaatgtaaaagcaaattattgtgacaagcgaactcgttgtagacgtacagcccaaagaagtttccattgctttactcgaagacaaaagcctggtggaactccaaagcgaaggaagaaatatttccttctctgtgggcaacatgtatttgggacgtgtcaagaaattgatgccgggcctgaatgcctgcttcgtggatgtaggttacgagaaagatgcttttcttcattatctggacttaggtcctcaatttaactcattagaaaaatacgtaaagcaaactttaagcgacaaaaaaaagcttaatccaattaccaaagcaaccatacttcccgaccttgaaaaggacggaacagtatccaacacactcaaggtaggacaagaagtagtggtgcaaatcgtaaaggagcctatctcaaccaaagggccgagactgacttccgaactctcctttgccggaaggtatcttgtattgattccctttaatgataaggtttccgtatcacaaaaaattaaatcaagtgaagagcgcgcccgcctcaaacaactgctgatgagcatcaaacccaagaatttcggtgtcatcgtccgcactgttgctgaaggtaaacgcgtggccgagcttgacggagagctcaaagttctattaaaacattgggaagaagctattgtcaaagtacaaaaagccaccaaatttccgacactgatttacgaagaaaccagccgcgccgtaggtttgttgcgcgacttgttcaatccttctttcgaaaacatctatgtgaacaacgaagctgtattcaacgaaatcaaggattacgtaacactcatcgcccctgaacgggcaggaattgtaaaactgtacaaagggcaacttcctatttacgacaatttcggtatcaccaaacagataaaatcgtcattcggcaaaaccgtttcatacaaaagcggggcttacctgattattgagcacaccgaagcgcttcacgtagtagacgtgaacagcggtaaccgcatcaagaatgccaacgggcaggaagccaacgcactggaagtgaatctgggagccgccgatgaactggcgcgccaattgcggctaagagatatgggtggtatcatcgtggtggatttcatcgacatgaatgaagccgaaaacagacaaaagctttacgaacgtatgtgtgccaatatgcagaaagacagagcacgacacaacatcctgccactcagcaaattcggattgatgcagattacgcgtcagcgagtacgtccggcaatggatgtgaatactacggaaacctgtccaacctgctttggtaaaggcactattaaatcgtccatcctctttacggacactttagagagtaaaattgactaccttgtcaacaaactgaagataaagaaattctcgttacacatccacccgtatatcgctgcctacatcaatcagggagttctctcactgaaacggaaatggcaaatgaaatacggattcggaatcaagattattccaagtcagaaattagcatttctggaatatgttttctacgatccgcagggagaagagattgacatgaaggaagaaatcgaaatcaaataaaagaaacggcgaagtctgataagatacttcgccgtttttttgtttatcacagtgccagacggtagatttccttactgtcctgtttagtcagtttcacataattgcccacaaactctcccttattgcgatgcaggctatccgccaagcggtctatatcgggattctcgatacccagttccttaaagttaaccggcagccctataaaacggaaaaagtgtttcaaacgggacacacccgccaatgccatctcttccaaatcctccgattcgggaacaccgaaaacacggttggcaaaccgggctatctttttcggattatgtccggccataaaagtcatccatgccggaactattacagacagtccggcgccatgcgtaacgttgtaaaccgcactgacttcatgttccagaaaatgcgaagcccaatcttcctcgcaacccacaccacaagtcccgttatgagcaatcgttccgcaccacataatattggcgcgcgcaccgtaatcttccggattttgttttatgcgataagcttctttaatgatagctgtcagcgtaccttcacaaagacggtcgctaatctccacatcctgcgtattagtaaaataacgttccatgatatgcaccatcatatcggcaatgccgcaagccgtctgaaaaggcggcaatgtataagtcaattccggattcataatggaaaagacagggcgcaacaattccggcacacgcaagcttagcttttgcagggtatccactttcgttatcaccgagttgcccgagccctcgctacccgcagcaggaattgtcagcacaacagcaactttcaatgcttccgtcacttttgccttacctataaagaaatcccaaaaatcaccctcataaggtacaccggcagcgatagcctttgctgtatcaattacagaaccgcctcctaccgggagcagtaaatcagcctgttcacgacggcaaatttcaatcccctcatacaccttcgtatccaccggattaggttgcacaccacccatctcgcaataacgaataccggctttctgcaaagattgcttcactctgtccaacaacccgctgcgcagcacggaaccgccaccatacacaatcattactttccgtgccccatacttaccggccaaggcaccgacttgcatttccgtgtccttgccgaatacaaattcggtaggactgtaaaagacaaaattattcatatacctataacataaaaacagattaacgcaaatatacgcagagtttcaatataaagaatgccccctgcgtaaatttgcgttaatccacaccttataatttatcctatataccgactgtatctttcaaagaaacgcttgaatacgccccacttcatcaacccttgttcaaatatcagaatccccagcaacgcacaggaaatgcccaacatcacatcaatcagataatgatgtccggaatagacagccgtccaccagatacccgccatgataacagagaacaaagctatcagccatttcttgcaacgtcccataatagcgtatgctacagccaccaccatataagccgcatgcaatgaaggaacagcggcaaatacattggcgttccgtccataaatggaatgaaagacagagcaccccagcagtccgtcaaagcgccccagtcccgctacattgcccggagtattgagaaccggctcaaagccataattcatggcataccagggcggtgccgccggatgaatataatatccggcaaacccgataagatttaccagcagaaagaccatggcaaagcgaagatataccttgcgttcgcctttcagataaagccacagaccgaatgcaatgggaacaggaacccagcaaaggtagaatataccggcaaagaaatcgcctaccgtacagtgattctgtgcaaaatactcgcagggaatcaatcttgtcccatcaatcgagataccgaacaaggacttctccgcctcatacaatccctgcacatcaataggattcacctcatagttgggatacacccgcatccagtcgtaagaaatgccaaagatgataaaaggaagtagcgctaccgccaatttacgggttgtttttcctgcaaaaaagagtatcagaaacagccccgtcattaaaagatgctctgtacgcaaccctatacacacggctgtcaacaacaagaacagtgctgtaaggacaacaacaggcaacgcttctttggcagaaggaaaaatatcttttctcattattgtttctttaataatttatagcaatgcgcaatgcgagcgaatgctgtcagattagcaagaacggctatcacggccataggaacaatcagtatcagcatcgggtcgaacgccttgcaatctccgaaaattccacagcacaaagcaccaaggctggtcagcaccacacgctcgggacgctgcatgaagcctactttacattccagtcccaatccttcggcacgtgcacgcacataactcaccataagcgaaccgaccaatgcgacaaaagtaatcattgatccccacagatacccttgcaaaatcagataatagaaaataccgaacagcgtcaccatttcgctataacggtcgagcaccgagtcatacaatgctccgaacgtagaagacatattacctacacgcgccacgcgcccgtccatcatatcgaacaaaccggcaaagagaactattcctcctccccagcccacataagcaagttcacccggtttatacatgcccgcatacacaaatacacatgcagccacgatgttcatcaccaatccggtagtagtaataaaattaggcgtaatgcctaccttgatcattccatgcacaaccggatttataatcttataaatcaactgttgcagccaatctctataattcatatcagttctatttagtctctaaaatattgtcgtataaatttcccgaaattatgattacgatatacgaatacccgttgcagatgatagttccagaagaacgccaccagaatggctacgataatcttggacaggataaacacatcgtttatataatgtcccagcaatccgtccacccagtgcatacccgtcagccactcggtcagggcaaacgtgccccatgtattcaataaaatactacctccccagacaaaaagatacttcagtgcaacatgcgtctttttgcagtcgtccgcatgaaatacccacccgtaattgataacgcagttcaccacgccgccaactacagagcccagaaaagtagcatacaaataaaaaagtccggatagtttaaccagcagaatggtcaccaagaaatctatgagacttgccacgtatgacgaaagctgagccttgataaagacccaaacagcatgacgccatcctgcaaatcccggttttcctttcagcttatcagccatcttactccgattaagactacaaagctataaattcccgccaagatatcgtccatcatcacgccaattccgcccggaaaactttccatgcggcggatgcctaacggtttgaatatgtcaaacagacgaaagagggcaaaagcccccaacgcataccagacatttccagacggtgctgccagcaatgcaatccacactcctaccatttcgtccaccaccacccgtgacgggtcctctccccagaaaggttcaagacaattggttgcccatactcccattaccgtaaaaaagagaataagagccaccgtcagccatatcaggcatatttccgaaacaatgaaagatattccgaaccagataagcacggccagtaaagcacctgccgtacccggagcgaaaggagaaaagcccgaaccgaagcccgtaccgatgataaccgggaaaaaagagggtttcttcattgataaaaagtgatagaataataaaagtgacaagataatgcggtgataaagtcataaaagtggtaaggcagtaaagtgatgaaatttcaagcggaaacttgccaatcactctatcgccttatcacttttattaccttaccgttttcttattttagtccaaatagctcggtgcagtttcacctaccatattgcgcagggtttctttcaccattctccattgttggaacaggtcatgtaccggttcgtgttcaaagtcgtgcatcgggctcttgcagaagaatgacagccaagtctggataccgcacataccggcacgcagagcgaggtcactgaagataaccaggtcgagtgcgataggagctgccaagatagagtcgcgacacaggaagttaaccttgatttccatcggatagcccatccagccgaagatatcgatattatcccatgcctccttgttgtccttacggggcgggtaatagttgatacgtactttgtgatatacatcaccgtacaaatcggggaatttttcgggttcgaagatattgtcgataacggacagcttgctgacttctttggtcttgaagttttccggttggtcaagcacttcaccgtcacgattacccaagatattggtagagaaccatccgcttacacccagcatacgggtcttgaacatcggagcaagtacagttttcatcaaagtctgaccgctcttgaagtctttaccggcaataggcacattcattttcttggagaattcccacatagccggagtatctacgcacaggttaggagcacccatgatgaacggagcaccttctgcgattgcagcgtaagcatagcacatgctcggagaaataacttccgtattgttttccttcattgccttttccagagcagcgagagacttgtgctcttctgccagaggaacataaatttcagtacttgcagcccacaacacggcgatacggtcgcaattgttatttgccttgaaagtgcggatatcctcacgcaactgctctaccatgtcccaacgtgtagcggcattcttgatgtgcgtaccgttcaggcgttttgcaaaattgtggtcaaaagcggcaggcatgggtttaatggctttcaactcatcttttacgaggttcaagtccttttctttcaaaacctctgcatacattgcagcttcatacgcatcatcagcgaaaatgtcccaaccgccgaaaacgatatcgttcaaatcaaccaaaggcactatatccttaatcagatgttctttgccgtcctgcatacgcatagtagccatttgtgcgattgagcctatagcttttgccaaccccttacgggctgctaatgtacctgtaatcatagtggttgcaaccgcaccacctactccgactaccagtacgcctaaacgaccggttgccggcttaatgttttctttcattgccattgaattattttagtttaaaaaattgctcaaatttagggtattttacccaatacagattagtctttttatccgatttaatgctctgttagtaagatttaagttaaaacgtcatgtgcaaactgattctaagcccggatttatctatattaggtaaatcgcggtaagtcaaacgccatacataatccacccggagcacttttaaaatattctcaacacctacccctacctccacgtacggagtgtgtcccatagtagtgcttcctgccggaaaggcaaacaatccttcactgaattccggattgttcttgtcgctcagatttccataaattccccggcaggacaacacttcgcgccatttcatttttttcaacaacggaatgcggttgaaaaggaaaccgttcaaaaagtaagtcacatcccacgaggcatattcatcgttcataaattccattgcattcatcagcgagtaagactccggctgaatggtgtaggacaagttggcattgggaatgataagcagcggaaaaggaactttattccacaccttaccggctttcagtatgacgtccgtatagccgaaagccgagaaccagaaacgtttctgaaatcctgcctccgtataatgataggtataatctccacccaacactcctttggcagccattgtatgcgtcagcgtaaataccggagcatccaaagataccggaaaacggttccactgtgtctgaaagaacttctcattaggagcataacgcagtttaagttccagttcactggtcgaaatactttttacaaacgacttatcttcatcctgcctgatgaaaggaatgagatgcgaagattcatctttccgcagacgtgtagtcacttgaaaggagaagcccgaatgaaactcgttcgtatacgtcagttctgcttttcgctgatagccgatacggtcgtccttctggcgtttcaacgccaagaaaacgttatcctgactggtatagagataatgttgcccatactggttgacatcggacagataacggaatttgagcgaatgaatcggaaactcattggcatattcctttttcttatggaaagaatattccagttccgccaaccctttcacacgttcgtcgcggaaaccgtacgccacatatcccctgccgaacaaatgcggattaagccatgccgttgtcatcccaccggcacgcacacgcactccttccagcgcattaccgctgatggtggtgttcatcataccgatatagaacaaaggagctttctccttaggcgcgggaatatatccggtaaacagcaccttcagcaccttctccgtccaataataaaccggataactacgcagttgcgccatcatcttgtctacggaagtctctttcttactcacttccgcaaggcggttggcatcccagtaagcatctgaatgagcggaagagtccataccctcaatcaccttctcgggttttcggaacgcctgcaaggcatcggcggtgggttcgtaagcataattctggtaataaacatcccgtttggcatagatgccgtcgctgttgtccaccaatttgaattccgtcgtgatactttcattcataagttgccttgtaccgtcttccgcacggtcaaagtcctgttctatcttcatgtaatccacaaagttcagattgattttctgaggaaagttcatcactacgcgacgcacgaaatacgtgctgtccagcataacgtacagatgccccgtaaagccgaacgactcggagttgaaaggcacgaaagtcaagtccacgcaaggctttccggcaacggtcagcgtatccatcagatagtatttgtagaacgaagggcctaaagaagataacggactgacaaacttattggtaaacagcgttatgttgttctgataaatatccacgtccgtcatagtaacgctgatggcctgctccatcccctgctgtgacagcatttcgtccactcccgcctgccgccgcgccttcacccattgcttttcgctgtgcggcgacttacggtaataatccgtagccagcaactcgcggttggacaccgccagtaccggctttcccgtcacggcggaagtatccacataatcggtcaggaacttgaacttgcggtacagccacttctgctgcttcacactgtcaaagttgttaatggcaaacgtcattttctcataacgctcacgctgccagaagtcgcgctcatccggagaataatcatcccggtgctctatcatcttccgcacaaactccacagccggattgtttttcttcttgtagcgctcgcgtttcggcttcaccaccacttcattcagtgcataagtggtgggggcaagcgccacttttatacgctccccgcgtgccggatgaatcagccgggtgtattcattatagcccacggccgagattaccagccgcgcttccgggcgataggtcttgaaggaaaatacccccttgtcatcagtcatccccccctctgtggttcctttcagatagaccgaggtatatggcaacggctcccgtgtcagcgaatccgtgacaacaccttgcactatatattgcgccctcacaggaagtgcaattatctgcaacagcagaaataccctaataaacaacctcataccttacccatctatcattcagtgcgcaaaggtacggaagaaaactttttctaaaagtccggttttgcggaataaatgttctaaaaaaccacttttattcaaaacacttcccgttaaaacccgttgtatagcgaatacgacttacaaaagacgtacaaaccgacctaaatacttaattatggaatggattttcaaccaactcagagaacgtcccgaattagccattttcctcaccatttttctggggttctggctgggtaagctgcgtatcggcaagtttactttgggaaccgtcaccagcgtgttattggtaggcgtagtagtagggcaactgaatattgccgtacccggccctgtcaagtcagtgtttttcttactgtttctgtttgccgtaggctacaaggtagggccgcagttctttcgcggactgaaaaaagacggattgccccaagtggcttttgcggtgctgatgtgcgtatccgttttaggagtaacctggctgcttgccctactcatgggatataacatgggagaagccgccggattgcttgccggctcacaaaccatatcggccgtcatcggcgtggccgaagatacaatggcaaacatgggactggacgaagcgcaacggcagagctacgtcaacatcatccccgtatcctatgccgtaacctacattttcggtaccgccggctcggcttgggtgctatcgtccatcggaccgaaaatgctgggcggactggataaggtgaaaaccgcctgcaaggatttggaagtccgtatgggcaactctcaggcagatgaacccggcttcattcatgccgcacgccccgtcactttccgagcctaccgcatcgaaaacgaatggttcaaaaacgggaaaagggtcatagaccttgaagtgtacttccagcaacaggacaagcgtctgtttgtggaacggatacgcaaggcaggcactatccgcgaggtcagccccaacgtgcaactggaaataggggatgaagtcgtactaagcggacgccgggaatacgttatcggcgaagaggattggataggacctgaaatacaagaccagcagctattggacttccccgcagaaaaactgcccgtcatgattaccaaaaagacctttgccggaaagaccgtttcggccatccgcaacgagaagttcatgcacggtgtcagtatccgcagcatcaggcgtgcgggcatcgacatccccgtcatggcgcagaccaccgtagatgccggcgacgtggtagaggtagtgggaaccaggcaggaagtggaaacagccgccagacgtttgggctatatagaccgtcctaccaatcagactgatatgattttcgtagggctcggcatccttgtaggcggattgttcggtgcactatccgtccacatcggcggcgtaccaatcagcctgagcaccagtggcggagcgctgatagcgggattgctcttcggctggctgcgcagcaagcatcccactttcggacgcattcccgaaccgtcgcaatgggtactgaacaatgtagggctgaacatgtttatcgccgtagtaggcatatcggcaggccccggttttgtacagggatttcacgatgtgggtatcagcctgttccttgtaggcgcagcagccaccactttcccactgattatcgggctgttgcttgccaggtatctgttcaagtttcatccggccatcgcattgggatgctgtgcgggcgcaaggaccactacggcagccctcggagccatacaggatgccgtagagagtgaaacgcctgcgctgggttataccgtgacgtatgccgtaggcaacaccctgctgattatatggggagtggttatcgtcctgctgatttaatgccctgaagactttaagcagattacctaataagtaaaaacagttttcaagcttactaaaatctttccgtccgacagctgtcggacgaaaattcaacaattgtcggacgataattcaacagctgtcggacgaatggaaaacaattatcggacgaatagattttagcatacctggaattagtttatgccgactgtcactttaattataacgctttttaaaaactaaacttcagattatatgaatacaaaacttttagaaaagaagatggagaatatcagtccctttgaactgaaaaaccgtcttatcgacatggcagatgaaagcctgaaaaagaccgcccgtaccatgttgaacgccgggcgcggtaaccccaactggattgcaaccactccacgcgaagcctttttccttctgggaaaattcggattggaagaatgccgtcacgtcatgtttctccccgaaggcatcgccggcatcccccaaaaacaaggtattgccgcccgctttgagcaattcctcaaaagcaatacctaccagcccggagccaaactgctggaacaaacctaccactacatgctgatgcagcatgccgtagaccccgacagcctcgtacacgaatgggcggaaagcgtcataggcaaccagtatcctgtgcccgaccgcatcctgcaattcaccgaaatgctggtatgcgactacctgaatcaggaaatgtgcgacaaccgtccgcctcgcggagctttcgacctgtttgccaccgaaggcggaacggctgccatgtgttacatcttcgattcgctgcaagagaatttcctgctggacaaaggcgacggtatcgccctcatggttcccgcctttacaccttatatagagattccccaactggaccgttaccggttcaaggtgaccgagttgcatgccaaccgcatgagcaaagacgggctgcatctgtggcaatacagtgacgaggatatagaccggctgaaaaatccggccataaaggctttgtttgtcaccaacccaagcaacccgcccagctatacgctcagccccgaaacaatggcgcgcatcgtaaacatcgtaaaggaagacaatcccaacctgatgattattacggacgatgtgtacggtactttcagcccgcatttccgctcgttcatggcagaaattccgtacaatacgctttgcgtgtactctttctccaagtatttcggcgctaccggctggcgcaatgccgtcatagcgctgcacgaatacaatgtattcgacagacaaatatcccgattgccgaaagagaaacgcgaagccctcaaccgccgctatgccacgctgaccctgcatcccgaaaaattgaagttcatagaccgcatggtagcggacagccgtcagatagccttgaatcatacggcaggactttcattgcctcaacagatgcagatgagcttattcgccgcctttgccctgctggacaaagaaaacagctacaagcagaagatgcaggaaattatccggcgccgcttgcaggctctttgggacaataccgggtttacgttagtggaagaccccttacgggtaggctattatacggaaatcgacatgctggtctgggccgaaaagttctatggagagaagtttgtggaatacctcaaaaaaacgtacagtccgctgaacgtagtattccgccttgctcaggaaacatctttagtgcttctgaacggtggcggcttcgatgggcccgaatggagcgtacgtgcctcccttgccaatctgaacgagagtgattatgttacaatcggccagggaatcaagcggatattggatgagtacgcagaagaatggaggaaaatcagaagttgagaattgggaattctcaattaaacaagattcggaagcgggtcaatccgtcattgtatgtgcgcagggagaatgcacaaccgtgacggctcagcacttccctgataaacaccaggccaatcccctgcccgttcggcttggtggagaagaagggactgaagagtttagcttcggtctctttgctgattccgggaccattgtctacgatttctataagagcgggggcagtggtccttaccgttatttcgccctgcttgcctgccgcttctccggcgctctctatactttcggcagcattcttaatgatatttaccaaaacctgctcgaacagcgaagcatccagacgcacctgtcctacttcggggtcgcattccaagcggagaataatgttacggtcattgcacattccctccataaaacgcttgcacatggataccaattcgttcagttgaacctgtgctaccgtaggttcgggtatcttcaccacatcggcaaagcgggtaatgaaacggctcatagagaaacagcgctccgtacacacgcgcatcacctcgcaaatgtcttccatattttcttccgtagaaagagcctgctccaccgtatccaaggtagaggtaatgccggcagtggtattgttcacctcgtgggcaatcatacggataaccttttcgtatgcacgcttttccgctttcatcacttcatccgtcatgcgctctatcaggaagaaaggatgcttgaaccctctgtctataaacgaagaatgggtacacttgtagatattcgcatcgttcaaccgcaccacggaagtcgtttctttaggaatggatgccagctcttccgccaaaggcgaatcaattttatccagtttcctgttctgcgcctcttccagacgaacgcccagcatctttacagccatcggattgagttgtgacacctcaccgtccaacgtcataatgacaacccccataggcgatgcctgaatcagcaaatcaagaaaatggttctgctcgcgcatacgcagacgctcattcttgagttgttccatcatacggttgaaaacgttcacaatacggtcggcctcatactgccccaccctgctgagccggctgctgaaatcctgctcgcgcaacaactccataccgcttcctatcgtactcatcggcttgacaatcttacgatagaacaccgccagatagagcagtatgaatacaataataccctccacaacatatagatgcgtggtctgcattttgcctgccaaatatatcaacgctccacccagcccaagcaaaaacaatacaagaataaaaaaataaaatttaatacgcacgtgaggtagggattaggggttagtgattaacgattagcgattaggggttaggggttaatgattagcgggtagtgattaacgattaggggctggtaagcgacgactaacggtcaagatttaaatgactaaacacttatcgctaatcactaatcgctattttatatttttccagccgtctgtatagagcagccctgctgatgcccagtgccaatgcaacctgactgagattgcctttatgttgttctaaggcttgcaggatagtttgccgttctatctcatccagcgtcatgccggcaaaggaagtgccatctgcggcttttgcaggttcgtcgtggcgttgatattgcgattcaaaatcagaggcgtccaaagtctgttttccactgacaagaatggtacgctccaccaggtttttcaattcgcggatattacccgaataaggcaaacgggaaaggaagttcagcgcatccgctgaaaattcggtacgcggcaagccgtttacggcagcctgacggtcggcaaagtgacgtgccaacaagggaatatcctcacggcgttcgcgcaaggcgggcagttttacggttatcagattgatacggtagaaaaggtcttcgcggaatgtgcgttcggaaaccattttgcgcaaatcggcattggtggcggagacaacacgcacatccactttgcgcgggcggctgtcgcccagcacctcaaacgtctggtcctgaagcacacgcaatagtttaacctggcaggacaaatccaagtcgcctatttcgtccagaaagatagttcctttgtttgccagttcaaaacgccctatgcggtcggcacttgcatcggtaaaagcgcccttcttatgaccgaacatctcgctctcgaacagactctgcgagataccgccgagattgactttcacaaaaggctgtctggtgcgctgactgttgatatggatagcttcggctatcagttccttacctgtaccactctcgccggtaatgagtacggaagcgttggtacgggctatgcgggctacggtatgcagcacctccatcagtccttgcgattttccgatgatgtgactgcggttcaaaccctccgcctgctcttccggcacttctttcggagcggcactcagttccaaggcggtttcgatacgctgcaaaagggcggcattgttccacggtttggtaataaagtcaaaagcccccgcctgcatcccctgtacggcaagttggatgcttccccatgccgtcatcagtataacgggaacatcgggacggaagacctttacctgtttcaacagcgtaagcccctcctctccggtagtggaaagtgtaaagttcatatccatcaatatcagtgcgggagattctgcacgaactatatccattgcctcacggggtcccggtgctgtttttacctcataaccggcacgcttcagcataaaactaagtgaagaacgtacggcactatcatcatcgactatcagtatcatagtattttgtagtttgttacttgcaaaagtaagttttttagccacaggtcatacagatttgcaccatttttttgttatttcctttataatcgtacaaatcggcataatttctaccggcatcagcctttgattatatcttcaaagtcggcttccaactccatgttccgttcaaaatcccaaagggtcaggctacggagttgatagaagtaataccaataataataaagttcggaaatgtgcttttgccgggcttcgtctttggagttctgcgcatcgttgaggtcaagggtacttattttaccaatcataaaagtctccacactggtcttgtaacgtttctcggctatctggtccgcctcttcggctatttccaactgctgggcttggttgttgaagtttgccaccagcaggaaaatgtcctgattgaagtccatttgttcctgtcggattttggaaagtaccacttcgcggttgctcttggctaccctcaccttgccgcgacgtttgccccaatcgaggataggtatttttacaccgaccttgacaatctggttgtccagcagatcctgataggcagatgagaactcatagttttgtccggtatagccaacgctggcaaacaggtctatactccttaaatttccacgtgccgtagccacttcataatcggcttctaactggcggcgacgtatattctgggcaaacgagttgcgttccaaagccttgttcagaacacggtcgtagtccattttaataccaggaacggaagcaggtataacaggattcagcccctcactctccgacacgccgagaaacgaacgtagctgaaacatcttggcgttcaaagtgctttcggcttcggtcacatcggctttgccttgcagagagttcagcttgagttgcagcaagtcgttttccgaaatctgtcccattttccgtttggcaatggccacttcgtaaagcctgtctgagtttgctttgttttgctgcgctgtggcaagcgcttcctttgccagcaataactcgaaaaaataagtaatggtcttcatcgttacctgctccgttgccgaaataaaggcagcctttgcctctgcataccggacaggttcgatacggcggttccacttcaaactgttcacgccgaatataggttgcgtcaattcaaggcttacgggtacggacataaactgtttgtcgccgccggagcccaactgcttgatgtaatcgagagaagaagccagcgacaacttaccgcctgtgaaccaaatgttctggtcaatggaaagtgcaccggacaaccccaatgtattgttacggacaaagctataggaaccgtccgagttctgataggtgctgtacgacttattataattgggtaatgttcccgtaaaatttatttcgggcaacaggtctgcacggaaagtacggtattcccaataggctgtcttcaattcgttaagcgccacggcagcatctacagattgggtacgcgccagtgcaatggcttccgctaaagtgatttcacgttcgtgcgtcaaagtatcattctgtgccgaggcaaacagtgatatcccaaaacaagcggcaagtaaaatattctttttcatgttcggtctttaaaattgtcgttgacagaaaagcaaagagtgtgccaagcaggcaggaaagtattacgcaagggggagtgtccgaaatcggacactccccctgttcgtttgcggacggttaataatggctcagtcccgagtcaaacactaaagtaccccttttgagctcggcaattcatagtgataaatatcgcgtttcaccgccatcttcaaggctcttgccagtgctttgaagattccctctatcttatgatgctcgttctgcccttccgccttgatgttaaggttcatcctggctgcatcgcttaatgacttaaagaagtgcaggaacatttccgtaggcatctctcctattttctcgcgcttgaacgcggcatcccataccagccagggacgtcctccaaaatccagacatacctgacacagacaatcgtccataggcagtgcatacccgtaacgttctatgccgcgcttgctgcccaatgcctgatacaggcactcacccaaagcgagggcggtatcctctatcgtatgatgctcgtctacttccaaatcaccttttacgtgaatggtcaaatccatgccgccatgcttgcctatctgttccagcatatgatcaaagaaaccaagtccggtatgaatatcacaatgaccgttaccgtctaaatttacagccacgtaaatatccgtttctttcgtggtacggcgcacttccgctttccgctcaccggcaaaaagaaattcggcgaccttatcccaatcctttgttgccaaaacacagacgtcctccaagccctcacacgcagcttcaccaccggccgatttcggtttcagcatattcgtatcttcctgtaagaggatagcacggcatcccagattcttagccaactccacatccgtagcacggtcgcctatcacaaaactatttgccaaatcgtattcaggattgtcgagatatttcgtcagcataccggtacgcggcttgcgggttggcgcattgtcttcgggcatgctacggtctatgcaaatatcatcgaaggcaattccctcaccttccaacgtcttcatcatcaggttatgcgccgaccaaaaagtttcttccggaaaagatgccgtacccaacccgtcctgattggtaaccataacgaactcaaaatccagcctgctacggacaaaaccaagattacgcattactttcggataaaactccagtttctccaacgaatccaattgataatctacgggcggctctataaccaacgtcccgtcacgatctatgaaaagtactttcttcataccctactactttatactttatatttctccaacgcctcaaccagcctttcattctcgtttctcgtacctaccgttacccgcagacagtttccgcaaagcgatacggaattacggttacgcacaatgatgccttcagccaccagataattataaatcttcaccgcatccgtcacacggaccagaaaaaagtttgcatccgaaggaaatattttcaccgtacaaggcagtttcacaaattcgttttccagattctcacgttcttctttcaatgtttttacccaacgctctatttcataataacggtacaacatctccatcgcttgtttctgagtcagttggtttacattataaggatactttatcttgctgaaaatcgaaatgatttcctgcgaagcaaaagccatgcccaagcgtatggcagcacagccccatgctttggagaaagtttgcagtacaatcagattaggatatttgtccagttcatccaaaaaagaaggcgcctctgaaaaatcgttataagcctcatccaatatcaccagcccgtcgaattcgcggatgattttctcaatctcactccgaagcaaatcatttcctgtgggattattgggagaacaaagaaaaatcagcttcgtatgttcatccgcagccgccagcaacttatctgccgaaaattgaaaatcctcgtctaacagtaccttgcggtactccacatcatttatttcggcacatacctgatacatgccgtacgtagggtctatagctactacattgtctatacgcggttcgcaaaaagcgcgaaatacaaggtctattgcctcatcactgccatttcccagaaatatgcgttcgggggagattttctttaccttcgacagttctttctttagctcccgttgcatcgggtccggatagcggttgtgcggcatattgtacggattttcatttgcatcgagaaaaacggatgcggcagcgccattatattcatcgcgtgccgaagagtaaggtttcaaacgccggatattcggtcgggtaagttcttctaaggttctcatggacagaaagagttaatttacggattatgaattatcaatgataaagtatgatttttaattttcaactctcaatttatcaagtctgacagttaccgcattcttatgcgcatccaaatgctcgctggctgccatttcctctatagcagggccaataatgcgtattccttccggcttaatttcctggaaagtaatcttacgtataaagctatcaaggctgacaccgctataagctttggcatagccattggtgggcagcgtatggttagtgcccgaagcataatctcctgcactttccggagtcagagagcccaaaaataccgaaccggcattaaccacccgctccgcaacggacatataatccgctgtttcgataatgagatgctccggtgcataggaattggtcagttcgatagcttcgtccatattgcgcacaacaatcagtttactattggcaagagacttttccgcaatctctttacggggcaacaaagccaattgacgctccacttcttctttcacagcctgctgtaatgccggggaagtggtaatcagtatcgcctgactgtctgccccatgctctgcctggctcagcaagtcggcagctacaaaagacggattggctgtttcatccgccagtacctctacttccgaaggaccggcgggcatatcaatagctacatcacgcaagctcaccaactgtttggcagccgttacgtattgattgcccgggccaaatatcttatatactttcggcacgctttccgttccataagccattgctgcaatagcttgcacaccaccggctttgaaaatacggtttattcccgccaccttagctgcaaacaaaacggcggggtgtacttttccatctttgcccggaggcgtgcaaagcactatctccttacatcctgcaatcctggctggaactgccagcatcagcacggtggaaaagagcggtgctgttccaccggggatatacaacccgactttctctatggcaactgccttctgccaacaagtaactcccggctgagtctctacccgtttactttcgaagcgttgtgccgcatgaaacgtctctatattccgtttggccagacgaatggcttttttcaattcctcgcctaccaacgcttccgcttccgcctgctccgcttccgtcacagccaatgcggtcagagccactttatcaaatttttcttcgtattccaatacggcacggtcgccttccgtttttacacggtctataatagcccgtaccgtatcaaaaaggttttccgtattcatcaccggacgtttcagcaattccgcccactgagatttatcaggattagtaattaaattcataccattaacatttaaagtatcattttttcaatcggcaaaaccagaataccttccgctcccaatgccttcaatttaccgataatctcccagaaacatttttcatccagcactgtatgtacggagcaccagccctcttgcgccaacggcatcaccgtagggctcttcatacccggaagtacggcaataatttcatccagtctatctttcggcgcgttcatcagcacgtatttcttgtcttccgctgtctttaccgcattcatacggaacaacaattcatccagaatctccttcttctcctcactcatattcttgttgccaatcaacagagcctcggatttcatcactacttctacttctttcaggcggttgctcaccaaagtagagccggagcttacaatatcaaaaatcgcatcagccaggccaatccccggagagacctctaccgaaccggtaatcacgtgtatttccgctctcaccccctgttctttgaggtatcgggaaagaatgccgggatacgaagtggcaatcttcttaccctcaaaccactgcggacccgtatattcaatatccttaggcaaagccaatgacagacggcatttgctgaatcccaaacgctttacaatctcagcatcttccgccttttccatgaactcgttttcaccgacaatgcccaaatcggcaactcccgtagctactgtttgcggaatatcatcatcgcgcaaaaacaatacttccaaaggaaaattggaagactgtaccagtaacgtgcgtttcgttgcgcttagtttaatatccgattcttcaaggaacgacattgtttcgtcaaaaagacggcctttggcctgtactgcaattcttaacatgatattatttatatttatggtttgcaaataaaaaaacgaggtttaccaatgttcggtaagcctcgttcattatatgttcttcattatgcacatatcctcatacgcccaccggattattcctcaggataataatggtgatgatgtgcaacgatattcttcatactttttctatttctaatgcgacaaatgtaaacgatttgttttaaacaagcaaggatttatcacgaaaaatttgatttttctttcattttcatcaaacaaggggtaaaatttcatccggttctacatcacaatgatgaaaacacatttccttttccgccttttcctgcgggaaagtaaaataggtacatgtagcctccgtacagagttcgcccatgctgttatacaatcttgcttctataacggcaatattacgtttctgctcacgcaacgatgcccgtaacaccaagtgtgtatcattggtagatatggacttacgaaaacgagtctccattttagaggtcactcctccggtctgcaacttacggaacaccacccaaccgcaaatttcatccagcaatacggactggatacccccatgcaacgtattcaaccacccctgatactccggacggggtttccagatacttactatctcatcgccgtcttcatagaattccattcttacacctgcctcattatcgggagaacagccaaaacaattataaccttccatgtttttccatgggttgataatcttcttcatacgatatctttattatatatttctttcacaactcttctgccacatcatatctttctgtatagccttgtaaatcgttatacatatacattaccttattaaggcgacttgtgcacgagcggcaactaaaccagatagtacaactgttattaacagatatatcctatgaaaatccataatacctttacatctgtttttcattcacaatacttttcacaaagatacgaaatctttaaaatggaatattagtaagaatacaaaaaacagtgtaaaatcggaataagcggttaagtttttccgatttcacactgttaccaatattacagaatatattactctttacttcttgcattccatactaacaacgccaacagaacagacaacaatgccgcacctatccaaaaccaattgatatacgtaaaatcataaacttctacaccatcaacgaggcgtttattaccctcaatcaatacaccgctcatcacatcctgcaaacctgctccgatataactggcaatacctaccactcccaaagctgcacccgaagcattgcgaggagcaatatccacagccattaatccacccagaaagcaaattagcacaccgatacccaggccaaagagaatcatcgctaaagcatccatccaaaaatgtacacccggaacaagcaggaaaagacatagagcaaacacattcatcaaaccgaaaatcaaggcaggaatattgcgacgaccgccaaaaaacctatctgagataacgccagaaaacattgttcctacaatgccgaataccgaacttatagaaataatgaaactggcatccaacgtagaatagcccttctcagcctgcagatagaaaacaccccagctatttaccgcatagcggctgatgtacatgaaagcactactaagtgcaagtatccaaatagccgggtttctcaataccgctttttgagcacgattgaactcctccgtctctaaagcatccatctcctttttcttttcaggagcattgacagcaggaagtcccttgctctgaggagtatcatggaaaaaacgccagactaccaaagcgccaatcagaccgacaaggccagcacccagaaaaccgtaacgccatcccagtgcacttacaatagaggctacgataatgaaagtcattgcctcaccgatgttgtgactcgcactccaaaagccgtaaaaagaaccacgtttcttgtccgtgaaccaacgggacaagccgaccacacaagaagcagcacccatagactgaaaccatccgctgataccccaaagaacggcaaacagaataaaagaatgtacaaatcccaaacagaggttcaccaaagcagtcaccagcaaaccggtcgacataaaacgattgatattgctacggtcagcaagaaaaccgttcataaacttacctacagcataggtaaagaacagcacagcaccgataatgcccaattctgtttccgagaaaacgccctcatctacaatcggtttctttacgacattcaggctcaaacgacaaacataatacatgccataaccaagtgtagcagcaagaaaagtagaccactgaagacgtttcaaacgctgtttctgttcggacaaagatccttcattacaaggtttcggttgtgaaaccctgtaaaagtttattatattcttcaacatacttttaagtaccccttacatctcaatcatgcaactttcttttccgtaaatagtccagtaagtaagcaggacgatcggtttgaatgatacggcatcctaatgtatcaattaagtagccataacctgaatccggattctgcaaagacatatcatcatcgtgtccgccagccattgtatcccataaagtattataccaaattagagaacgtccgttcaaggtagttgcaagttttttaggaagcaagtttgtatcttttacaaatagtaactcaaaagcaactggagacatatctttaataaaagcctctatgtgtttctcggctccagaagcatcaaggtcaacaatcggcatataaattacatcttccaaataatcaccaaattgtttcttcacttcggcaaccggttttctccctttcattataatttgtttggtagttccggttttcttcataagctcataaatctgatcaaagtaaaggtctgcctgatccaaatttatcatgatttttcctttagcatgcaacaatgcctcttccaaagtcggcactttgtgaatagtacggatattacaaccatttctcaaattcaacttacgaatatcactcaatgtgttttcagaaaccaatccttttccggtagtagtacgatccaatgtgcggtcgtgcataagaatcagttcgccgtctttcgttttcttaacatccaactcaacaatgtctactcccattttaatagcgttatctattgcttccaacgaattttcaggaaaattacgccaatctccacgatgagccactacaattacagaagtcgaatcgcgactcatcagcttttcacgaatctgcgcaacatgatcttgtgctgaaagttgcaatgcaacaaagacagcatacaataatatatatatttttttcatttctattatttttaaaagcctggagagttatctctccaggatagtttattaattactcaaccgtatacccttcattctgccagccgcccttatcactgacattctctatttctgtctgaggaatcggatataactgacgataagcagctattcccggaaatacagtagtcatttgtccggtacgtacgatatcaaaccaacggtcacattccaaagccaattccaaacgccgttctttatatacagcctgacgaaaaatttcttttgtagatagctcttctaatgtctttcccatgagattagcattaatacgaactgcatttaaagcatccaaagcttcctgtgtaggaatggcagaaagttcattggcagcttctgcgtacatcaacatcacttcggcacaacgcataacagggaaatccgcacttgtttcattatttgttgcgggagcatcgaatttacccggccgctgaccgcttcccgttggagctactaacgctttccgattatcgtcattattttcaaattcagcctgttccaaagatattatattaccgttatcattatttctatatcgattattctgatgaacggattctcctacaccacctttcagatactggactgcaaaaattatatctttactagtctttaaattattaggaaaagtttgaggcataggtaccaaagataaattccgcttagcattgatatcagcaactacagaagtcaattcattaatcacttcttgatagtttttcatgtataaatatacttttgccaacaaagcacgtgctgcataagatgtagcacgccctcgctctgattcatcccacacttccggcaaacctttagctacaatcaggtctttgataatcaagtcataaacctcactaacaggagaacgcttgttgttacgtgcttcagctacagtctgcgtttttgtaataataggaacctctccccataaacgcactagattaaagtaacacaatgcacgtacaaaagaagcctgtcctgctatttgcgttcgttgttcttcagtcatttgtactttctccatattttggagtacaagattacaacgataaatagtcttatataaagaaagccatgcacccgacaaattggaattagccggagtttcggtaaatacctctatttgataggtaataccaccactggcaccagaattgtcattcttaacattatccccccgaacttccattaaagtcatgaacttagaaccatattgatcactcgattgcaactcatcataaataccaataatagccccttctaatcccttgacatccgtataaaaagtttcctctgtaggaaaatcaacaggtttcaaatctataaaatcattacaaccagaaagagcaatcgctgtaaaaatagatattattatttttttcatattatagtatttttaagattaaaacgtaaggttaacacctatagaggtggttcttgccaacggataaaccccataatcctcaccattggtagtcactgcactacgattggaaacttctggattataaccttcatagtgagtgaatgtaaatggattttggagtgagcaatagatacgagcagattttaaataaaccttctttatccaattttcaggtaatgtatatcctaatgaaatattcttgatacgtaaatacgaaccatcctctacatgccaagtagatgtagtaccattctgtcctttgctaacacgattggcacgcacgttcattccacttcccggctcatcttccgacttccaacggtttaaagcacccttataattattcatattcccttcatgattataaaaatagcgccgagaaagattcaagatttcatttccttgaacaccctgaaatacgatgccaaagtcaatacctttccaagctaacgttgcaccaaagccgtaagtaaagtccggcatataattacctacaatagcacggtctgtatctgagatatcaagcactttatcaccattcacatctttaaacttgaagtctccgggtttcgtgtctgccaaaccgtagtttgttggagaatccatatagtgcaaggttgcatccacttcttcctgattcttgaaaactccctctactacaggtaaataataacttccaataggctcacctacacgggttataaaataagcattactcactgaaccggaagaaattatatctgcattaccaggcccgagctcctttacttcattgatgtttttcgaaatattaaaatatacactccaattaaaatcacccatcttctggttggtagcaatattaaattccacacctttgttattgactttaccaatattttccagacgagttttataccctgttgtcatcggaaccggaacatccaataataaatcataagtattactattgtataagtccaaacccaaagtcagacggtttttaaataatgatgcatcaaaaccaagattaacttgagctgtcttctcccaatgtagttcaggattaggcatactcttgggggcagctcccttaacaacatctgcactattcccacctaatacatagctgtaataagcaacttctccctgagccccataattgggaatacggaaattacccgtcaaaccataactggcacgaagtttcaaatcatcaataaaggtcaatgatttcataaaaggctcttccgttaaacgccatcccgccgataccgaagggaaccacccccaacgattatccttaccaaaacgagaggcaccatctgcacgaagtgctccagtaaccatatatttacctttataattatattggactctagcaagtcctgaaagcaaagcccactcagaagcatgagagtctccgcgcgttacagtaccggcattcagagtaggcacattatttgttataaatccattagcaaaagcgtatgtactctcatcgcgctgatattgcatagtccaccctgccaacgcagaaatggaatgccctttaatatccttattataggttacagtttgctcaaacaaccaattatacatcttagccgttttggctgttgcttcaggctcagattccggattaccttccgtattggcaacaggaatagtagatggacgaaatgtatcttgtgagctgttgtaaatatctacaccaaaatttgcacgatattttaattcgggcataaaagctacttctccataaacattaccaaatatacgggaagcttttgtttcatccttttgcaacaaagccaatgctaccggattccacacttgagtttggctatttccttttttaacagaaccatcctctagtgtcgtctgcgtattcggactccaagcattctgtgcaaaacaaaaagaaccatcagcattgtaaacaggaaatataggagcactatgcaaagctgaagcaataatgccaccaccatccttattataagcaccatcagagttcactgcattctctatcgttacagacggatttaaagagagcccaaacttaaaaataccttcagtaacatccagattaaaacgagaactatatctcgtaaaatcactgttaataattacaccgtcttgtgacaagtaatctacagaagcataatattttatcttctgacttccaccagataccgaaacagaatgattctgcatacctgccgtacgaaaaatctcgtcttgccaatctgtatcaaccaatcccttttcaccccttagataaggtaagatttcaaccggaacaatcgtattataatcattaccggtattttgtaaacgtatggcattactatcagtaatactaaaggccaaaggctgtttattttgagcgatacgtttacggtttaccgcttccattttatctacataggtattatttcgagcgtcgtttaccaaatcggcatattcgtaagcgttcagcatatctatttttttagatacagtctgccaaccataatatccattataagaaaccgtagctcgtccttcctgtcctttcttggtagtaatcagcactacgccattagagcctcgcgacccataaatagcagaagaggaagcatctttcagaacctcaatagactccacatcattcatgttgaaagtattcagttgctctttggcaagaggtactccatctactacatacaacggtgatgttccagcagtaatagtacctgtaccgcgcaccttaatttgtaaagaagaacccggtgcacctgtagattgtgaaacttgtacacccggcattttgccaaccattgcttcagccatagaagttacaggctgtcctttcaaatcactggcacgtatactggcaatagcagttgtcacatcgcgcttcttctgtacaccatatcctactactacaacttcatccagcaattcattatcctctttcatcattattttatcaagtcctttgccattggctttcaactctactgtctgataaccgatatatgaaaaggcaagtaatgcattttccggcacatctatcaaattataatttccatccatatcagtaattacaccattagtagtgccttttaccaatacactggcaccaatgataggttcaccatcttgatcgacaactcttcccttgatatttctcagttttatacctttcgaagtgccttgtccggttttctgtttaccaacagatattgtatgattatccctattgaaatacaattttgtctgtaaagtaatacgctccaaaacatcctgtagagaggcacttgatactttgagggtaatgcggggagctgaattaacaatttcttgatcatagaaaaacttcagtcctgtttgtatactcaattgattaaagacattttctgccgtttcgttctgaacatttaatgttatgcccttcacttcttgcgcctgtatataataacttgtaaatgaaaagcatatgaaaagtaaaaaagctaaaaatgaatgtacattttcagatttcctttttgtattaggaagattattcataaatttgtgcgttttagtaattgtaataaattatttaaaacaaaggtttgtaatacacgagacgctattcacacgggtcgaaacgaatgaatatctgtccggattactagtataggggctgctctgagagatagctcctattttttggcagattaagatggtggtttcatatccgatatagactaatgtttaacaatacaaatataatacactgtagttctcaaagacaggggtgtattttatattttttcactatttatagagctgaatcatattccccattctcttgtaatgaataccgcttgtatactccacagcctgtaatacagcgtccaaactcttattatcatgttcaccagaaatgagattgtcaaaattctgtccctcagcaaaagtaatgcgacaattatacatacgctccaattctttagccacatcatgtatcggagtactattgaaacgtaaattaccttttcgccaaaccgccatagtgcgttcttcgcgcctcttattatattctcctgaaacagtattgataagcacctgctctttagcacgtagacgcatcatcgcttccggcaaatcaacctggactttaccactttccacatctactgatactacctcgtccgaagaataagatttgatattaaaacaagtacccaagacacgcacatcgaagtggcgggtatccactacgaaaggctgcttctcattatgatatacgcgaaaatacccttcaccttccagttctattctacgttccttaccggtaaaacgatctggatagtgaacacgcgaacaagagtttaatatcaatgtcgtaccatcgggaagctgtacttccttgcgttcgccaaaagaagtagaagcctctaaataagatacctgtgttctatctatataacgaatgtaactaatactgccaaatacaagacaaaccatcgcagccacacttgacacagccaatgcagcccgacgaatccacatacgtttcttatgctctatgcgctttaataacagtcgcgcctcttttttatattgttcgcgttcaaggtctgtctgcggtgattgcagggaagtttcttcccatacttcagcagccagatcctgaagcatatctgtatcatactccgaagtctgtaactcatccaacaacttacgggcatcatccattgtatacagatcgtccaaataacgacgcagcagtgatttattattttcactatttttcataaaatataattctaaatgaagcaagattattaaaaataaccctttgacattaagatatacacataagaaaagaatgactggggtgtgattaatattttttaatatacactgttaaccaaaagcctttattaataataaaatcatgattatcaacaacttaaaacacaaaaagcacaagataaagtcagtgattctacataaataagcaagttcaaatcaatattttttgtcgaataaatacctgaatttatcattttataaattcaaacaaataagaatcaaaatcaaatcagaacctactatcgaattcttttccaaataagcacgcagtgttttcaatgatatggaaatggattcttgtaccgtattaacagaaatacctaatacttcagctatttcacgatgagacatttgttgctcccgactcatctcgaatatttcacgttggcgaggggtcaactgttgcaatgcacaggaaataaattgccgcaagtcgtttgctataatttcatctcttgtttcgttggtataattcacagcttgtgaaagtatctgttcccttaatttatcttgataagacaaatcgcgtagctgattcagtatacggtttcgcacgattgtatacagataagcggaaaatgaagcatccggattgatgaaacggcgtccctgccacactattgtaaaagcatcctgaaaaatatcttccgcatattcacgcgatttcaaaaagcgcatagcaaagtatatcaaacgattcttataggcagcataaagctcacaaaaagcatcttcttctccttcaatcaaacgaagtaccaaagaacgttcatcactaggaattttggttgcgtacatactgtatttttagattttgcgacaaaggtatcgttatgatgttacaaacctatgtaaaattcaggaaataaaaaaggaaaaggacgtattctactctttattaaacggaaattcactatcttcgtatcaataaagcaataatagaatgctaagaggaatctgcttttgcatatgtatgtcggtgatgctttctttgtttgcccaaaataaagaaagcaattttattgcacctgaccgtactgtccataaacgttcggaaattatcaaaagagcaataaaaaaattcctcgatttcagcgatttcgatacagcatatatcagccccaatcgatataactacgccttaatgctcgatcatttcactaattacgaatactattccgtaggaagcggtacccccgaaccgcaacgtttgcgtttctcaccaaaaccacataataaaataggcgtttactttggctggcgctggctttttctaggatgggctgttgatgcagacggactttacggaaagaaaaatgggaaaaaaagaggcagagagttcgacttcagtctttacagttctaaactaggtgtggatattttttataaacgtaccggaaactcttacaaaatacacaaaataacagggttctctgaccgtattccaaccgattattctgaagatttcaacgggctgaaagtaaagatgaaagggttgaatctatattatatattcaataacagacgcttttcttatcctgccgctttcagccagtccaccaaccagcggcgcagtgccggctcttttattaccggattttccgtatctgcgcataatctggattttgattacacccaattgccccctatcattcaggaaacgatgaatccgggcatgaaagtaaatcatataaaatacaccaatatcagccttaacttcggctatgcctataactgggtatttgcacgcaactgccttgcctgcttgtcacttaatccggcagtagcctacaaaacctcacgcatcagaaaagcggaagaagaaacagacgaatggtacaaaaacttcaatatcgacttcatcctgcgtgtaggtatcgtgtacaacaacagcaaatattttgcaggtacttcattcgtaggcagaacatacgattattaccggaacaatttctcattgaacaacggcttcgggacactgcaagtgtatgcaggctttaacttctgcttgaaaaaggaacaccgcaagaaaaaacaatgacagcccgttcttatcagaaagaataagtacaagccactcctactatattttttcgcgccttactctcccactgacggcaataaaagacgtccgcttcccaacaatcagaaaacaacggaagcaccactccgccacgataacgcatacgctgtacatcaaaccgttctccacggttcaatccgttatacatttcaacagaagcgtaaggctctatcttgcatttcggaatatcatacgccaatttaacacgcgaacgccaacgaaactcatcgtcactgctgtcgaaagtatgttgaaaacgctcacgaagtgaaaccttcagtctttgtacacgcgtggaaagcgttccgtcaaaatgataacggtgacggaatttccaaccggcttctccacgattgcggtaatggatttcgtaaccggccgctactttcagaaaaggaagcacagaataggctccccccacatccaatccccagcggtctgtcttacccaaatcatcctttgtacgccattccaattttccggacaaggtaaatgccggctttactttatatttaaaaccggcacttgcccatgtagtaaagtctttctcctgtgcatgcagaaaagcaggtacaatacataatactgctactacccaaccatagattttccacgtataagaatccttttttatcataactgttcctgaatatatcatttaacattgatttcacgtgtgcaaagctaaagattaattctgtaacaaaactgtaatatcagatttctttacacaaaaccgattgttacggcaaaaaatccaagttgttttttctggatagcagaattatggctaaaaaacggcttgcccgtgcgaaatttctttcaaatgcttctctatcttttcaaagaaggacgctagatgcgacccgtctacaaaagcatgattcacatatatggaaagcggaaagaccagacgctctccgcgggacaccactttaccggcagtcatcaacggatggctgcagccgttaccggcttcggcaacggtataagtagttgaagtgaaatacatcttgggcactgcactcaaatgcaccacatcgtaatcaccttgttgcatcaatactctttcagcgttataagggtctccgtcctcagggatgtttgtaatcagtgcatgggcctcggcataaaaatgtttgaagtcttcatgataaggaatacgaaccgtataaaaagtctttcccggaacagctatcggagaaatgatgtccacccgatcatgaaaaacgacctgtccgttcttgtctgtacggtaacggagttcgtccacctcgttggctgaacggagaaccgcatacaggtaataaagaaaaaaagagtgtccggactgttttgcagcagcgctggcctccgtacagtctatctcggtagtcaccgaataccatgaatttaaaaacgttcggaaaaagccgtaattgtcacgacgttcccaagtgtcaatgtcgataatgtgtttcataaataaaaaacggattatgaaaaaaggacgcttatacagcatcctttttccaatttaatttatcatttctcttttttgtagttctccaatccggtctgcaagaactcaatgtacttcggaatactctcatcatacgaatatgacttattgagcggtttgccttcattgtcaatcaacacatagaaaggctgcgcatttgcaccgaactttacacgctgcaaataactccacttatcgcccaccgtacgcaaagtacgttccgtaccattctccataatcttcaccggtgaagaaagcggagttttgttatctacataaagtgtaatgagtacatagtcattattaataatatcgctaactttagggtcggtccatacggcaagttccatcttacggcagttcacacaaccgtaaccggtaaagtcaagcatcaccggcttgccatgctggcgggcatactccataccgaggtcgtaatcatcgaacttggcatgcacctcattattgtaaagattgaaatcctgagtctgcatgggcggcgcaaaagcgctgacagctttcaacggcgctccccacaaaccgggaagcatatatacggcaaacgccaatgaggccaatgccatgaagaaacggggtacactgacttttgtgtcatcatcatcgtgcgggaacttgactttgcccaacagatagaacccaagcagggcaaacagcacaatccataaagccaggaatgtctcacggtcgagtatgcgccaaccgtaagccaagtcagcaacggaaaggaatttcaacgcaaacgccaattccaggaatccaagcgttaccttgattacattcatccaaccgcctgatttgggcattgacttcagccaggacgggaacagtgcaaacaaagtgaacggcagtgccaaggcaatggcaaagcccaacatgccaatagccggagctatcatgttaccggtagtggacacttgtaccaacaagaaaccgataataggacctgtacatgagaatgacaccaatgacaatgtaaatgccattaagaatatgctcagcaaaccgcctgttttttctgcttttgaatccacggcattactccatttggaaggaagcgtaatttcaaaagccccaaagaaagaagctgcgaaaacgaccagcatcaaaaagaagaagatgttaaaaacagcattcgtcgacaatgagttcaaagcattggcgccaaatatcccggtaaccaacagccctaaaccaacatatatcactacaatagacgcaccgtatgtccaggcatcgcggatacctttcttcttatctttactacgtttcaggaagaagctgacagtcatagggataattggccatacgcaaggcgtaaacaaagccagcagtccacctacaaatcctgtgataaaaatataaatccaagacatatcttcctgcgaaacggtttcgcctaatgcttgcagttcatcgataaccggcttccaaaggtcggtggttccatcaccggcaacatttattccggtatcgctttccgcaccgccaataatggccatagctgcggtttgagcggtatcggaagatttttccaattctacatttccggcatccgcagccttatcggctgccggtccattaacggctgtaccttccgccttgcccgaaaacttaaacggcacttgtgtaggcggtaaacaattctcatcattacatgcgccatattccaaaaaaccttctaccttatattcgccaccggtcagtttcaacttctgtacaaactgagcggtattttcaaaatagcgcactttcatttcaaacaacttatcgaatgcggccacctctttccctaccggttttaattttccgacaagttccgcacctgaaatggactcgacattgaatgtggccgatataggtccgccatcgcccaaatcggtcgagtacacatgccagcccttatcaatagttccggtaaagacaacttccgcttcaccagcctgcaaagtctttaattccgacttaaacttaaccggctcttgtatctgtgcttgtaccactacggcaaacagcaacagaagtatggagaatatacttttcttcatgttattatcccatattttatttatacttcatagtctacacaggcacggctttccttaacctcggctataagcttaccggcagctacatgatcgggatgtgcagcatagaatttcacatcgtccaaagtatcgaactcactgtaaagagctatactccaagtctcagccggattaatgttcaatcccacttcaatcttacgtataactggtattttagcaggcagcgcttcaatagctttcttaaaatcattcatcgccgctaacttttcgtcagcagaagcttcgtctttcagcttaaataatacaatatgctttaccataactttgttatttaaatgatttaatctatatttgtcaatcgaaacaataacatttttaagacacaaaaatactcgtttttttcaaatatatacttaaacggatgttaataataggaattgcaggcggaaccgggtcgggaaagaccaccgtcgtacgtaaaattgttgaaagcctgccggctggtgaagtagttttattacctcaggactcttattacaaagacagcagccatgtgccagtagaagaacggcagaatattaatttcgaccacccggatgctttcgactggggacttttgtccaaacacgtatccatgcttcgcgaaggcaaaagcatcgaacaacctacctattcctacctgacctgcacgcgacagcccgaaacaatccacatcgagcctcgggaagtcattatcattgaaggcatccttgccctatgtgacaagaagctgcgcaacatgatggacctcagaatctttgttgacgcagacccggacgaacgccttatccgcgtcatccagcgcgatgtcgtagagcgtggccgcacggccgaggctgtaatggaacgctacacgcgtattctgaagcctatgcatctgcaatttatagagccttgcaagcgatatgccgatcttatcgtaccggaaggcggaaacaatcaggtagcaatcgatattctcacaatgtatatcaaaaaacatttataaataattcgaacagtacatatggccgagcgtacttccccaaccgggcgcaatttgccagctttccactgtcaattactgattgcattagtcttgctttgcagtgttatggggtgtcgcggcaatcataatgcagcagccgaacaagaagaagctgttgatttacaacagataaaagataacggagaactggtagtgctgactttatacagttctacatcctattttatttaccgcggccaggacatgggatttcaatatgaattgggtgaacagtttgccaaaagcctcggcgtcaagttaaaaataaaagttgccaaaaacatacacgacctgattgaaagacttcttgcaggcgaaggcgatctcattgcctacaacctgcccatcaccaaagaatggaaagacagtctgacatactgcggtgaggaggtgattacccatcaggtcatcgtacaacgtacaggcggccgcgtcaaaccgttgaaagatgtaacggaacttatcggaaaggatgtgtacgtaaaacccggaaagtattatgaacggcttgtcaacctggacaaggagctgggtggcggcatccatatccataaggtcagcaatgacagcatcacgattgaagaccttattatgcaagtttcacaaggcaaaataccgtataccgtagcggacaatgatgtagcccgtctcaataccacctactacccgaacctcaacatcgggctttctatcagtttcgaccaacgggcttcgtgggctgtacgtaaagattgtccgcagcttgcagaagctgccaataaatggcatgagaaaaacatgacttctccggcttataccgcgagtatgaaacggtattttgaaattggcaaagctatcccacactctcctattctatctctgcgagaagggaaaatatcacacttcgaccatctattcaagaaatatgcaccagacattaattgggactggcgtttattggcatctttagcttatactgaatccaactttgatactaccgccgtttcatgggcaggtgcaaaaggactgatgcaactgatgcctgccacagctcgtgccatgggagttcctccgggaaaagaacaaaaccccgaagaaagcattaaagctgccacgaaatatattgccgccacagccaaaagcttctcgaaaattccccaagaagaacggattaattttattctggcatcatataactccggtataggacatgtattcgatgctatggcattggctgaaaaatacggcaaaaacaaatatgtgtggcgggataacgtggaaaacttcatcctcttgaagagcaatgaagagtactttaccgatccggtttgcaagaacgggtatttccgtggaatagaaacttataacttcgtgagggatataacggcaaggtttgaacagtataagaaaaagataaaaagctgattcacgggataggacataaaaattacagcgttttcagacataaggacaagagaatagagtaggttgcaatgtatactttttgctgcatatttttctgttctcttgttcttatatctgcaatacgacagtgaaaacctcaaaacaaattcagccgattagcctttgcctcttcaagagataccgtttcaacttgtttctcctgatttttctcgcgcaactgctgatacttgttagaaagcttcttcacgaactcttccttttggttaggattcatcaaacgagctgccaccgttgcattctgcgaggcgtctttcaggtgaataaccggagcatgataaaccggagcaatctttaatgccgtgtgcaaaggagaagtggtagcgccacctatcaacagtggtacatcgagtcccgccttttccaattcaatggcaacatgtaccatttcatccagcgaaggagtgataaggccactcaacccaatcatgtttaccttttcctctatggcccgctgcacaatcgtttcagcgggaaccattactcccaagtcaattatctcatatccgttgcaagccattactacggaaacaatatttttcccaatgtcgtgcacatcacctttcactgtagcaagcaacaccttgccggcagaggcagccccttcctgcttttccgattcaatgacaggctgaagaacagccaccgctttcttcatagtacgtgccgttttcaccacttgcggaaggaacatcttacccgcaccgaacaaatcgccaacatggttcattccggccatcagcggaccttcaatgatatccacagctttaggataaactttcaaagcttcagcgaggtcttcttccagataatctccgatgccttttgtcaaagcatacttcaaacgttcctctacggtatcttcacgccaggcaagctgagaactgaggcttgaaagctgggagttaccgttagagagagaattcttggccgcttccgcctcggctttcaaccgttcggcagtctcaatcaaccgctcggcagcatccgaacgacgattgagaacaacatcttcgatacgttccagaatatcggcgggtatatcggtgtaaagtacggaagtggcagggtttacgatacccatatccatcccctcgcgaatggcatgataaagaaagaccgcatgcattgcttcacgaatataattattaccccgaaaggaaaatgaaagattactgactccaccgctgacatgagcgccgggcaggttcttccgtatccaaccggtagcacggataaaatcgactgcatagttattatgctcgtccatacccgtagccactgcaagtacattcgggtcaaaaattatatcttgcggattgaaaccgaccctgtctaccaacagacgataagcgcgttcgcacacctcaattctgcgttcgtacgtatccgcctgtccctgttcatcaaaagccattacgactgcggcagcaccgtatcgctttatagtacgggcatgttcaagaaacttttcttcgccctctttcaaagatatggagttgacaatggactttccttgcatacattttaaccctgcaactatcacatcccatttagaagaatctatcattacaggaacacgggctatctccggctcggatgctatcagattgagaaaagtggtcatttccatttccgcatccagcaaaccgtcgtccatatttatgtcgataatctgcgctccgtcttctacttgctgccgggcgatacttagcgcttcatcatattttttctcattgattaaacgcagaaacttacgtgaaccggcaacgttgcaacgttcgcccacattgataaagttgttttcaggctttacctccaacagttccaaaccggagagccaaagattatcgggcagagaagccggtatacgtggcacagctcctgctatcaaagacgaatatgcagcaatatattcatcggtagtgccacaacaaccgcctattatatttaccagcccttcatgaatgtactccctgatctcatctgccatttcagccggagtctggtcgtatgtacccagactgttaggcaatcccgcattgggataggcactgatataataaggagtacgagcagccaactgttcaagaaagggtttcaattgacgggctccgaaagaacagttaagcccgacagagaaaatatccgcatgttgcacagaagcaagaaatgcttccagcgtctgtcctgacaaagtacgtccgcctatatcggaaaccgttacggaaagcatcagcggaacccggacacctatagcttccatcgcctgctccgcagcatatatcgcagccttagcattcaacgtatcaaatatggtttcaatcagcaacgcatccacaccggcttcgagcatcgcttccatctgctcgcgataagcagcagccaattcatcataagtcaatgcacgaaaagccggattgttaacatccggactcatggagcaagtcttattggtaggcccgatagagcctgccacaaaacgcggtttatcggaagttaaaacagtaaattcatcggcaacttcacgcgccagttttacagcggcaaaatttatctcacgcacatactcctgtacgtgataatcggccatgctgacacttgtagaattaaaagtattggtttcgataatgtccgcacccgccgcaagatacttacggtgaatatcccgtattacatccggacgcgtcagacaaagtatatcattattaccttttaactgtccgggaatttgcgcaaaacgtttaccccggaaatcatcctccgtcaagttgtattgttgtatcatagtgcccatagcaccgtccagaataagaatgcgctcacgcaccaacgtttcaatagaagccacttttatttaagtataaagtatgaggtattctttttaaagtatgaggtatgaagtattaaatacgaggtatgaagttaaaatacaaccgataaaattatcaagatataaatattacacctgcttatacttcagaccttatacttactatacgtactgcttatcgtttgaatgcacgcgccatatcgcgtttgtcatctttttctttcaaagcctcgcgcttgtcgtattgcttcttaccctttgcaagagctacgactacctttgccagccctttttcattgatgaacatacgaacaggaattatggtaaagccggggtctttagaaccacgttgcaacttgtccagttctttctttgtcaacagcagtttgcgctcccgacgtgcattatggttattgtacgaaccgtaaaaatattcggcaatatgcatattcttcacccatagctcgccattggcgaagtagcaaaacgtatctaccagacttgcctttcccaaacggatagatttaatttccgtaccggtgagcacaatgcctgccgtataggtatctaccaattcgtaatcgaatgtggcacgtttattcttaatatttataggagcttgtttcataaaatcaatcagtttagcactaccgtcagcttattgaaaacgaattctatcactgccggacaagctattaacaacatggaagaaagaatggtaaaccttaaacggtctttttccgctattttcatcagaatagcacttccttcccacaccacatatacaatataaaattgaagcaacagggctattatactgaaatcgggcaatatgccgattatgattttcagcatgaaagatactaccaacgcatagccggcaaactgttgcaccaaaggtatatcattgtccatagcaaacatacggacacgtagcccattgatgagataggctgccaaaaaatatcccccgaacaaggataccgccaccgcacaacattgcgtcatggcatattgaaaactttgcggcccaccccatcccttagccaccaaagagcctataaagacggacaacccgcataaaccaatcataggatagacaaaagctgtaaagacttttcgtctatcctctaaactaatttcctcccaggcacgtgccggagaggaaatcagttgcattgctatatggaacagttctttgtaattcaattaattattattgatttgaaggattccatttaaaattttcaattgtataatctgtatacttctcaggcaatttagcaccatccatatcggtttttgctttaattcttatcgttgtaggatagctaccgtgctttcctttaaaatccgacatgatttgttttacatcgtaagctttgtttctaacagcaaaaacatctgtcttggtatcagttcctttgttatgtctcaaataaaagacaagttctgtactgctttcattagattcatcatttatatacaccaattccattgtatgctgtttcaacatttcctccttattctccattttccaagaaataggcaacacgagcatttcagcaccatacatccaaggcttataagtctgtccgtaattgtctgtcggctccaaagtcacaataggagcagtttctggtatagcctccatatcttccacggaacttgcatatctggtagaataagaatccacagcaattgcactgactaactttatacgataatcctgcggagtaaaagtaccaccctcagctttagttgccggagtatcctccacatatttaaaagcaatctgagctaaatcagtacccgacattttaaagccctgagcttccatttctgtaacggaagccattgtcggatgatatgtattaccatataaatcaataaaataactccccattacagtgcgtacatatcctattccatcatacatgctttcgccggcatcatcattaagacacgaagtaaaagaaacgcccattaataaggtaaaggcaaccattaagaatttcaattgtttcataaacattattttttagagtttgcaaagatataaaattcaattcacataaggtaaatgcagaaacttaaaaaatactgcaactgttactttattattttcgcaaacgactctaaatgttcatctacatagcttgcaaccaaagccgtatactcctcttctttctccagaaactcatcttccaactcatcaaaagcctcatactgctcgtacattgccataaattcgtcatcagtacgctcacgttccaaatcttcacgatggacatcatatatctttttggcggcatacaccaatttgcttaaatcgcccaccccccacaaacgcattactttggcaaacggattggcaaagatatagccaccatatccgttttgtaccaactggcagaaaccaccttccatgagttcgtcgcggaatatctgatacgccagcaacgaatgctgttctccggtaagcaacggcatcgtatcggcagtaagttcgccgcctatcactcttttatatgcatctgtaaatacttggatgaaagcatccattccttcgcccgcagcttgttgcaaagccgcatcagtaacttctaccataatagtatgtatattgaattaacgctgcaaagttaatacaaaaactgcaaagtctactttacattccacagagttacaacttattattacctatttttaataaaaaagtcaaattgaacggttggcagaaagcaagaaaacgactacctttgtgaccgtttaataaaacatagaactacgttttttaaattataacttaaaaaaagagctaattatgacttattcacacgaagtggaacacatgtgtgttgtaaagaaaggtcctaaccacggaccggctcccatacccgaagaaggcaaatgggtaaaatcaaaagaaatagttgatatttcaggtctgacacatggtgtaggttggtgtgctcctcagcaaggtgcttgtaaactgactttgaacgttaaagaaggtgtcatccaagaagcattggttgaaacaatcggctgctccggtatgactcactcggctgctatggctgctgaaatccttccgggcaagacaatcctcgaagcattgaataccgacctcgtttgcgacgctatcaatacagctatgcgcgaactcttcctgcaaatcgtttacggtcgtactcagtctgctttctctgaaggcggtttgattatcggtgccggtctggaagacttaggtaagggattgcgcagccaggtaggtactctatacggtactttggcaaagggtccccgttacctggaaatggcagaaggttatatcaagactattgctcttgacaaaaacgatgaaatctgcggatacgaattcgttcacatgggtaaattcatggatgaaatcaagaaaggtactgatgccaacgaagctttgaagaaagtaaccggtacttacggacgcttcactgcagaacagggagctgttaaacacattgatccacgtcacgaataatataaggaggaaagaaactatgattagagaagtaaaatttgaaagtcaagaccgtcgtatcaaaggtatcatcgaagccttgaacgccaacggcatcaaagacatagaggaagctaacgccatctgcgaagctgccggactcgatccttataagacgtgtgaagagactcagcctatctgctttgagaacgcaaaatgggcttatgttgtaggttgtgccatcgctatcaagaaaggctgcaagaatgctgcagatgctgccgaagcaatcggtatcggtttgcaggcgttttgtattccgggttctgtagccgacgaccgcaaggtaggtatcggtcacggtaatctggctgccatgttgctccgtgaagagactaagtgttttgctttcctggcaggtcacgaatcatttgctgctgcagaaggtgcaatcaaaatcgcagctaaagctgacaaagtacgtaaagaacctttgcgttgtatcctgaacggtttgggcaaggatgctgcacaaatcatctcccgtatcaacggctttacatatgttcagactcaattcgactactacacaggtgaactgaaagttgttcgtgaaatcgcatacagcgatggtcctcgtgccaaagtaaaatgctacggtgctgacgacgttcgcgaaggtgtggctatcatgtggaaagaaggcgtagacgtatccatcacaggtaactctaccaacccgacccgtttccagcaccctgttgcaggtacttacaagaaagaacgcgttcttgcaggtaagccctatttctcagtagcatccggtggcggtacaggtcgtacgcttcacccggataacatggctgccggtcctgcttcttacggcatgacggacactatgggtcgtatgcactcagacgctcagttcgctggttcttcatcagttcctgctcacgtagaaatgatgggattcctcggtatcggtaacaacccgatggtaggatgtacagtggcttgtgcggttgacgtggctactgccttgaacaagtaatataatacattactaatatataaatccctgtaactgtaatggttatagggatttttattttatatccattacaatacttatctccctattctgatactcatttcttcttataataggcggtgattgaatgatggcaataaaataaaagcgcaattcagattgctaatgagttgtgcttttattatttttgtctttggtatcttagtgttaaacgaataactacatacgcactatgaaacagatattatttttattactaataaccctatgttcttgccattccactacttctaagaaagggcaagaaaatgaagcagacagcagcctgttacaagaaaagttgtatccagacagtatttttaaatttaaacctattccaacgaaagaagaacaagaacaaccatcggaaacaacatcctttgtcctgcaacctgttccgcgtgatattcctacgggagaagccgtcagccctacttcactttccatgcagacagaatacgattattatccactgtcaactacagaagtgaaactaaccgttaccaattattcccaacaagagtatatgtgtggaaacgattacagccttacctattacaataatgataaacgacaatgggaaacattgccaaccgacccgattattgaagatatagcttggatattagaccctgaatatccttcgggagaacagacaatcaagctttatacttccaaagttcctaatcgtgctggcaaatatcgtatctacaaaactttcaacagaaacgcccaagttgcttatgcagagtttgaattagttgatgaagccggagccaaacggctgagaaaacagatggatgccgcctcttggaatggcaagacaatttcatcacagaatatttatggctctggtatgcgcggtgattcaatctttgtgaatctgattaataattccattcattttcaaaaattattcagaaaggagatgcttaactattctgccattaactatggagcagtacgcaaaccttccccctttacacaaagagcatataccgacacactgcaaataagcatgaaaaccgagaaacctgtttacccgattggaacagaaagtgtaaatgtaatactaactaacaagaacttaagccaacaaaatttattctttggcgaatattattttgtagcacgcaaacagggagaacaatggataccattacatgacaacagtttggtgcacgacattggcattatattgaaacctgacggtgattaccatttcaaagccaaactctatccattgttcaatgacaatacttccggtcaatatcgggtttacaaggaagtggaatttaacggtataaataagaagtggtatatggcagcagaattcaagattgaataaaaataatagcataaaaccattactgtttttcagacagattaatatccttacaagtatctgtcacgcctatatacctgttataagaaaacaaaagccatacacaataacagataaaacgaagtataacctattagttctcagcatgaaacttttagtttcgctaaaggaaacaaaaaatcccaactggcaaaacatctattttcctttcactatcagatagaatgcggctcagcacagtcaagtttgaaaactgtgttttcacttgcctctgctctcgcctttcactatctttgccgcatgaaaacggaattaaaggaaaacggagggctcccggcacatatactctggacgcttgctatcgtggcaggtgtctctgtagccaatctgtactataaccaacccttgctgaacgtaatacgccacgagttgggcgtgtccgagttcaaaaccaaccttatcgccatgataacgcaagtgggctatgctatcggtttgctgttcatcgtgccattgggcgacctctaccggcggaaaaagattatcctgacaaactttaccttgttgatattctcgctcatcgccataggtgcggcccccgacatctacatcatatggggagcttcgctcatcaccggaatctgctccatgataccgcagatcttcgtgccgatagcttcccagttttcccgtccggagaataaaggacgcaacgtaggcatcgtcatatccggtctgctcaccggcatactcgcctcgcgcgtcgtcagcgggtttgtcggcgaagtgctgggttggcgcgaaatgtacttcattgcggcaggcatgatgatgctgtgcgccattgccatgctgaaaatactgccggacatacagcctacattccagggaaagtacggcgatttgatgaaatccctgttctcccttatcaaagactatccgtctttgcgcatctactccatacgcgcaggcattgcattcggctctttcctcgcgatgtggtcgtgcctcgcattcaaaatgggacaagccccgttctatgccgacagtgatgttatcggcattttgggactgtgcggaatagcaggtgcatctaccgcatccctcgtagggaaatatgtgaaaaaagtaggaatacgcaacttcaactttatcggttgcggtctgattctgctggcatgggcatcgctctacttctgcggcaacacctatgccggcatcatcgccggcgtgctactgatagatatcggcatgcagtgcatccagctcagtaaccaaacgagcattttcgatatatgcccttcggcatccaaccgggtaaacactattttcatgacaacctatttcaccggcggttcattggggaccttcctcgccggcagttgctggcagacctggggctgggtaggagtagcaggcataggcacggtgctgaccctgctgtctcttctgattaccatctgccacaaagagcaacagcatgccctattcccttgatattttttcatggaaaacgcaaaaagaaatttcaaattgctttgattttctccataattattatacatttgtcgaatacagatttaattaataaacatttatctaaaatcatctaattatggaaacacacaagaaaatcacagtgacaggggttctttccgaaggtatcggcttaggcattaaaaatgcggtatccatgctgggagctactgttctctggctgctcactatttggattccttacctgaatgtaggcacaaccatcgctatgaacaccattcccattgaattgagtaaaggaaaggttatttcccccttattcatcttcgacgggaaataccgtaagtacatgggggaatatttcaccttgataggtttgatgtaccttgccattattcccgccttgtttttcatgattataccggggatcatcatatccataggctggtcgctcgcaatctacatcttactcgataaaggcgtggctccgggcgaagccatgattcgaagcaacaaagccacttacggttacaaatggactatcttcggcgtatcattcctgttggggctggctttctatgtccttatgatgattatcttcaacatagcaagcggcggatttgcaatgctccttctcttcatcatcgccattgtatacactgtggcagcacttggatgtaccgctgtcatttaccgcaacctgacggcagaagcacagccgaaagcaacggaaactgcggcagaagtataaacagctattgaaaaacacacccaaaagcccctttcgcttttaagagggtatgtcaaaactaaaattcgcttacgattttttaggcacggaattacacagaattcacggaaacacaaattacacggaaaacacagattttctttattctttttttcgtgaaatccgtgtaattccgtacctaaaagaaatcattaaatgtattttgaccccctcatacggaacagcgaaaggggatattgtctgtcgatatttcctcttcttatctcgatacccgtcccgatgtatttccattcatcaggctttccacctcatccaccgtcaccagattgaagtctccataaacggtattttttaatgcggaagcggcaagagcaaaatccaatgccttccggtcatcatccgaataagtgatcagaccgtatatcataccacccacaaaagcatcaccagcgcctacacggtctgtttcatgttcaatatcataaatgcctgtatgcttcaaagtgccatcggaataaagaacagcagcaagcacgttatgattggatgttatggaattacgcaattccagaaacactttttgacaacgtgggacaagtcgctccacctcttgtccgaacttctcgaaagatggcaaatcagactcaaaagaaacatcggcggtatcaacagctctaaatcctacgggctgtatgccgagaatctcctgatactcaggttctgcgccgaaaatgacatcgctgtactgcaccaacggctgcatcacttcggcagcagtacaaccgtagttccaaagtttcttgcggaaattcaaatcacacgagatggtaagccccatacggtcggctatttcaagcgcttcccggcaagcgtcggctccctcttgcgaaagggcggcagcaatgcccgaccaatgaaaccagcctgcatcggcaaaaatggtttcccaatcgatcatacccggacgaagcgtggcgaaagaagaaccctcgcggtcgtacaccacattggagtttcggaaagctgcgccgcattccagataatacaatcccaaacgtttaccgccaaacacaatgccgtccgtccccagcccgctggcacgaagcgaattgatacatgcacgcgacacggcattatcgggcagacgggtaacaaattccgtaggaatgccgaagtgcgccaaagacactgccacattagcctcactgccaccatatgtagcaataaattcattagtctgcgaaaagcggcggaaaccgggcgtagtaagccgtagcataacttcaccgaaagtaacgactttcttatcggtggaaagggatttctttttcataagtcttatatattcaaaagcatcaatgggaagtcaaatatactatcaaaattccaagtaaacgcaaagaattgataatatttattggcaggaaaggaaaatagaaaggtattaggcagttttgttgtatttttgtcacgtcatatttacagtaagattatcgcatgagtacaacaaagaaaattccttctcctcttgtatcctttctccccatcgtcctcttaataggaatgctgtttgccaccatccgcactttcggcagtgacgctttgagcggcggaagccagatatccctgctcaccaccacagccgtttgtgtctttataggcgtagctttctaccggattccctggagagattacgaaatagccattaccaacaatgtggcgggagtgacttccgccattatcatactgctgattatcggtgcgctgagcggcgtatggatgattagcggagtagtccctactctcatatactacggaatgcagattatacatccggacttcttcctcacctccacctgcgttatctgcgcattggtgtccatcatgacgggaagttcgtggaccaccatcgccactatcggcatcgccctcctgggaataggcaaggcgcaagggtttgaagagggctggattgcaggtgccattatttcgggagcgtatttcggcgataaagtatcgccgctgtcggatacaacggtacttgccgcatccgtcacggatactccgctgttccgccatatccgctacatgatgattaccaccattccgtcgctcgtcattacgctggttatctttacggtaatgggatttgcctgcgaaaccagcggtacggagcagatagccgagtttaccgcatcgctgaatgccagattccacattacgccgtggctgctgattgttccggtggttacgggaatattgattgcacgcaaagtaccctctatcatcaccctgtttctatccacgcttctggctgcaactttcgctattatatttcagcccgaactgctgcacgagatttccggaaacaatgatttgtttgaagggacaatgatgagcctgtacggcagtaccagcctgcaaagtgacagtgccatgctaactgagctgattgccacacggggcatggcaggaatgatgaacacgatatggctcattatctgcgccatgtgtttcggtggagcaatgacggcaagcggtatgctgggaagcatcacttccgtattcgtccggttcatgaagaatacggtcagtgtggtagcatccaccgtcggttcgggaatatttctcaatcttgccacagccgaccaatacatcagcatcatccttaccggaaacatgttcagcaacatttacgagaagaaaggatacgaaagccgcctactgagccgcaccacggaagatgccgttaccgtaacctcggccctcatcccgtggaacacgtgcggaatgactcaggccaccattctgagcgtacccacactgacctatcttccttattgtttcttcaacctcatcagcccgctgatgagcatactcgttgcggcaatcggatataagatagtgagaaggaaataacttcatagccccgccgccaactccttaaatctcataaaattaaaaaagagagtgaacaatcgcggatggacattgttcttgcaataaacttataacgaacaatataatttaaacctaaacaaaaattaagtatgaaaaagtttattgcattagcagcattagtattgatgagcatggtgacaaccaccgtgtatgcacaagagagtaacgcacaacgccgtgcagaccgcaaagcccaaagagacgcagagcgcgcacgcctgaaagcggaacagcaggcagccgacgcggtctcctacgatgatgccgtagcagcgctgaaagcacagaagtttgtattggaagccaatcaggtaatgttccgcaacgggcagacggctttcgtcacttccaacacaaacttcgtattggtaaatcaggcacgcggtacggtacaggtggctttcaacacggtttatcccggtcctaacggtatcggcggcgtaacagtggacgggacggtatcggacatgaaaatgtctaccgacaaacgcggcaacatcaactgtaatttcagcatccagggtatcggcatctccgcacagatattccttacgctgaccaacggcggtaataatgcaaccgttaccatcagcccgaacttcaactccaatactatgactttaagtggcagcctgctgccgttgaaccaatcgaatatctttaagggacgttcctggtagccctattacaatatatatattcccaactccgctgcaagtcgcttaaaaagtgtacatttgcagcggagttttatatattatattcatcatgagagaatttatcatcgcggacaatcaagatataaccaaagcaggcatgatgtttctgttgagcaaacagaaagacaccgccttgctgctggaagccgacaataaagcggagcttatacaacagctacggttacatcccgaagcggtggttatattggactatacactgtttgactttaccggcgccgatgaactgattgtattgcacgaacgcttcaaaacagcggactggttactgttttccgacgaactgagcgtcggctttctgcgacaagtattgttcagcagcatggcattcggagtagtgctgaaggacaattccaaagaagagatactcacagcactgcaatgcgcttcacgtaaggaacgctttatatgtaatcacgtcagcaacttattactctcgggaaataaccagtcggctgctccccaccccactctgcaaaacgctctgctgacgcctgccgaaagaagtattctgaaagagattgcattaggaaaaacgaccaaagaaatagcagccgaaagaaacctcagtttccataccgtgaacagccaccggaaaaacatcttcagaaaactgaatgtgaacaatgcccacgaagctacgaaatatgctatgaaagcgggcattgtggatttggtggagtactatatctgatttccccgcttccgatacaaagcttggcagcctcatcatatacaacgccaaactggccgggagctatgccctgcaacttctcatctgaaacaatacgatagcctgtttcgtcctgccacagcctgccgccgataaatccgggagcatggcgtatcttgaacgtaaccggaatctcatctttaatgccttcccacggattttccgtaataaaatgaaaatcctgcatactgaactcatgtccgtattgcagttccgtatcatatccgtgcgacacataaattacattctcgtccgtatctttacgaaccacaaaccaaggtccgccactcaagcccaagcctttacgctgaccgatagtatgaaaccaataaccgcgatgcgtacccagtatctttcccgtttccaactcaacaatccggccttccttttctccgaggaaacgacggacaaagtcattataattaatccgtcccaagaaacagattccttgactgtctcgtcttcgggcactgggcaactgagctttcaaagcaatatcgcgcacttcctgtttcatcagtccgcccaacgggaacatcagtttggacacttgcaggtagtctatctgcgcaagaaagtccgtctggtcttttacggggttgagggctgttcccagccaggtctttccattctgcagaacggtagtagcataatgtccggttgccgtaaagtcgaagtgcctgccgacccgctgttcaaagcaaccgaatttaatcagcttgttgcacatcacatccggattcggagtgaacccgcggctaactttttcaatagcataagcggctacattatcccagtactcccgatgtaaatcgacaacttccagcgaaagaccgtaacggcacgctacggcagaagccatctccaggtcttcctctgccgaacagtccatatactcggcatcatcctttcctatctttatataaaacagagagggacggtgaccttgctcacaaaggagatgtacgacaaccgaactgtcaacacccccggataataaaacggcaatattcatattaataatgtatctaacatttcatccgacgaacaaatggtttcatcggacgaaatgctctttggttccggacttaaattttctccaacgcttgggacaaatcatccaacaagtcatctatatgctccgtccctactgaaaggcgtaccgttcccggcttgatgccctgctctgccaattcctgttcattcaattgcgaatgggtggtagtagcgggatgtatgacaagcgactttacatctgccacatttgccaataatgagaatatctgcaagttgtcaataaatgtctgagcttccttctctccaccccttacctcaaaggtaaagatggaacctgctcctttcgggaaatacttccggtataacgcatggtccggatgatttggtaaagacgggtggttcacagccgccactttaggatgattcttcaaaaactccaccactctcagcgcattctccacatggcgttccacacgcaaagagagtgtttccaaaccctgcaaaagaacaaaggcattgaaaggactgatggcagctccggtatcgcgcaacaaaacggcacggatacggacagcatatgcagccgcacctgccgcatcggtaaagcgcacgccatgatagctcggatcgggttcggtcagttgcggaaatttaccggaagccacccaatcgaacttgccgccatctacaataacaccgcctaaagaagtaccatgtccgccaataaattttgtggcggaatgtatcacaatatcagcaccatgttcgatagggcgaatcagataaggagtaccgaaggtgttgtcgataatcaaagggattttatgacgatgagcgatttcggcaacagcaccaatatcaataacattggagttaggatttcccaatgtctcgataaacacggcctttgtattctcctgaatagctttctcgaagttggataaatcgctcggatcaacaaaggtggtcgtgacaccgtaagccggtaatgtatgcgccagcagattgtatgttccgccataaatggttttggcggctacgatgtggtcacctgcacgcgtaatattctcgaaagcataggtcacagccgctgcaccggaagcaaccgccagccctgcaacaccgccttcaagggcggcaacacgttgctcgaatactccttgtgtgggattcgttagtctgccgtagatgttccccggctcttgcaacgcaaagcgggcggctgcatgtgccgagttgcggaatacatacgaagtagtctgataaataggtacggcacgcgcatctgtagcggggtcgggctgttcttgtcctgcatgaagttgcagtgtctcaaaatgtaaattctttgtgtccattgtcagttgtatttatgagaggatagaagcctgtttccaatcctccccgatttatactcggatgttgcaaagatagagggataaaaccaagcaagctatgacatacaatagggaattttataccatatttgtggtagatacaagaagtattcgctatttttgcggacgaaaaccaaatgatatagagactgatgaagataaggaagctgttatattttcccttactgggactccttgcactgacaagcctgttttcctgcggagaagaccgttggaaagaatactatccgctgacagggcgcgacctgtggatggacagcctgatgcgggaagtctacttatggtacgaggatattccggctgccaacagtctgaactattttcaggctccggacgctttcttaaaaagtatcttatcaaaaaacgataaaggcttttccaccgtcgattcaataatggatactccgttgccaagttatggttttgactacacattatataaagtggctaccagcgacacaacctatactgccctcgtatcatacgtggcaaagaactctcccgccgaggatgccggactggaacgcggcaactggataatgcttgtcgacggcgactccatcaccaaaaagacggaagaaaggcttatagatggcggtgcacgaacattgcgcatcggaaagtatgtgatagtaaaagaggagaacaacggcggcacagagggggatacggaaaacggagagaacgaagaagaagaagaagataaagaggtaggaatcatacaggaaacaggagatgttgcactcccggcagtccgtccggtaacggagagcgccatctatgacacaaattttatacaactgaaaggcactgattacaagatagcctatctggcatacaactctttcactgccggcactgcggaacagagtgagaagtacaacaatgagttacgtgctttctcccaagaatgcaagcaacgcggcattaataatcttgtactcgacttccgctataattccggtggagaaatggaatgcgtgcaacttctcgcagatatccttgtacctgccgataaattggaaagcccttttgctttcttgcaatataatgataagcaaagcgcccaaaaccgtgacctgatattggactcccaactcttgcaaggcggagtcaatctgaatctgcccaccgtttatatcatcacaagcggaaccactgccggtgcagcggaaatgcttattaactgcctgaaaccctatatgaaggtagtgctcatcggacagacaaccaaaggagaatacgtggctacggaaactttcatcaatcccaaatacccctgggcggtacgtccggtcgtatgcgaagtattcaactccaacggagaagcggactatagcgcaggctttaagccggatatcgctatcaacgaaacatcctacctgcaatactatctgcccttaggcgagcctgacgaaattttgctccatacagccctgcaagtcatagctggaattgtcgagttgccgaccccaaaaacaggcactgccatagtccggagtttcaccactcaaaagaacctgcgcaaggggttgattgtcaaatagcagaaacaatgaattaaacaacggaaataatgagaaaaatagtctttgcattgtcggttgtactcacagtaatgacagcttgtgaagacaataatgactctaccgtcaacggaaaccgctctgccgtacccttttccaaaattcaattatcggaaaaaagtgcctatgaagcgggagtacctacagtaaccaccactcaaacctactcatacagtcagggacaattgaccggattcactatcgtacaaagttattcggttcaaggcgaaccgatgtgcattgaaaacgcagcatcagtaacttatagtgaacatcaggctgtagtaacggataatttcggcaatgtgtcagtctataccctggacgacaaaggatacgccacctcatgtacacggcaggaaaacggtacgatccgcacttatactttctcgtatttcaccgctccggaaggtaaatattacctgaaaaacataaccgaaagcatcaatgacggcgtatacgcatccattgacatagactacggcaactatcaggcattgcgcatcctgcaaaagacagatgcttacgggcaggcatatacggctaccactccggcaaatgacggaataaataatctgtcaggagttccctgcctgtttctcgccgaattatatccgctttcgctacatacagccgctctatacgggaaattcctgggagagccgtttcctattttaatagaccggattatccccgatggaaataaagaggtcaccaattatatcttctcttttgacaaacgcaatctcatgacttcctgcaaagaagtcataaacagttacggcacggattatacccgtaccgtaagctatgtaattgaataatcatctgctaaagaatttgcagaaaaacagaatgtgataatctatggaattattccaatacgtaccggtatgaccgccgggacgtgttataaaatcgtggtctatcttgcactccagcaaccttttgtgcagattcctgttcacatcaaggaagaaatcgctttcaccgcaatcgacaatcagagccaaatcaccgttcttcagttcatcaacctgattgattaccgtatgactatcccataccgcttcattggcggcaagctcgcccaactgcttcttcatttcccagttatcaggaaacggacggatatccactccgccactcatacttcccgccgcaccgaatatgtcgctgtggcggatggcattccacaacgcaccgtgtccacccatactcaaaccgctgatggcacgcgcactcttcttgggaatcgtagcataatgctcatccgtatacttcaccagttccgaagagatgaaagtttcataacgataagcggaattccggggactgtcccaataccaactgttcttaccatcgggacatgcgaatattacgcctttttcatcggcaatccgaggcagctccggcttgacgccaatccacgtacgtgcgttgcctccataaccatgcaacagatagattaccggacaagcttgcggatttccggcaacagccttatccggaagaatataaaccacctttacctccctgttcatcgaaggactttttacaaacacagtatctacacgtgcggcatgtacacttaaagccagcacttgcaataagaatacgaacagataaagtttgtttttcatgctattttgtttaatcttcttaaggaacggcaatattaataataaatatccaaaaaacattatctttgtacacaaacaatttgtaatccaaacatggaatttatcattattctatttctacttatcctgaatggcatctttgccatgtacgaaattgcattagtatcttcaagtaaagcacgcttagagactcttgtaagtaaaggaaacaaaagtgcaaaaggggttttgaaacaactggaagagcccgaaaaatttctatctaccattcaaatcggcattacgctgattggtatcatatcaggtgcatatggcggcgtagccatagccgatgatgtaactccgctatttgccatgattcccggcctggaattgtatgccaaagacctggcaatggttactacagtagccgttatcacctatttgtcgctcattatcggagagctggttccaaaatcaatggcactgaacaatccggaacgctatgccaccctgctcagtccttttatgattatcctgacaaaagtatcctatccgtttgtctgcctcctcagtgcttcaaccaaactgacaaacaagcttatcggcatgaaagacggggaagaacggcagatgacacaggaagaactgaaaatgattttgcatcaaagttccgagcagggcgttatcgacaaagaagagaccgaaatgctgcgtgatgttttccgcttctcggacaaacgtgccaacgacctgatgacgcaccgacgcgatgtaatcgtgttgcacccctccgacacgcaagaagaagtgcttcggattatccaggaagagcacttcagcaaatatctgttggtggaaaacggcaaggacgaaatcataggtgttgtttctgtaaaagatattatcctgatgctgggtggtgagcaaccgttcaatcttcgcacaattgcgcgtccgcccttgtttattcccgaaagtttgtatgccaaaaaggttttagagctatttaagaagaacaaaaacaagttcggagttgttgtagacgagtatggcaatacagaaggcattatcactctgcatgatttgacggaaagtatcttcggcgatattctggaagagaacgaaacggaagaagaggaaatagtggccagagccgacggttccatgctggtagaagcttcgatgaatatagatgactttatggaagcaatggggatattgaattatgatgacctgaaggaagaggactttaccactttaagcgggctcgccatgttccttataggacgcatcccgaaagccggtgacattttcagctacagaaacctggagtttgaaataatggatatggaccgcggcagagtagacaaactgctcgttattaaacggaatgatgaagaataacgccaccggcgtctctttatattaatttaaaccattaaagcaatgaaaaaagtaatgatgattgcagcgattgccgctgcattggtatcctgccaatcaaaaggaaatcaaaacaacaacaccatggacgaaggcgtaatgactgttgccggcaacgattcttccgcagtagccgtttatgaaggcatacttccagctgccgacggtccgggtatccagtatgtgctgagtgtagacagtgtaggccctaacggtgaaagcggctatacattggtcacaacttatctggatgcggaaggacagggaaaaaacacctccttcacctccaaaggaaaacgtcaggttattcagaaagacgttaacaataataagaaaaccgcctataagctgactcccgacaacggtgactctcccgtgtacttcgtggttgtaaacgacaccacattaagactggtaaacgatagcctgcaagaggctgtaagcgatttgaattatgatatcgtacaggtaaagtaaaacagttgccactgaatataaaaagaggttgtgtcaaaacgttggcacaacctcatttatattttaagttctgctatattttcttttggctatgctactttttcctcatgcatttggcaacaagttgctatattccaattatatcgggttataaatagtcccataaacatatatttggcaactgtaatgagcccctttccttcttttatcagtttagcacacatttttttgatattaaaggctatagcaaagaaagcaaagtccattgtaaccttgtcttctcccacatgccggaatcttctgtatgccatgttgtatttcatttgtccaaacacagcttctggttctatacacctcctgcctctatgcttgataccttcttctgagagcaatctttcccgtgcctgccgtttgtattgatttaatcggtggttgacttctataatacggttcccccgagctttaaaacaactgccacgcaaagggcaaccttcgcatctttttgctttataccgggcactttcggtgatgtatccactcgctgtcttgtcacgtttggttcctatacggttcatgtgctgtcccataggacaaacgtaataatcctccccctcattgtaatggagactttcggcatggaacgggttgggagtataacggggacgctgttttttatggaagtaattgtacttgatgaaggcttctatcccattctcctgcatgaaccggtaattttcttccgaaccgtaaccggagtctgccacgcagatattcggtaaacggttatagcggtactggaaagagtggaaaaaaggtatgagggtcagtgtatcggtagggttgggaaacagacagaagtctgtgataaattggttttcagtacctatttgcagattatatccgggtttggtctgcccgttcttcatggcatcttctttcatgcgcatgaatgtggcaccaggatcggtcttggaataggagttacgttctccaagggtatcaaggtgattgtcatattctatcagcttgtcacgatacccttcaagttccctgacctgcttcttctttttgcgcagagctttcttttcttccttatcctttgttgcaggctggcgttccagggcttctttaagttcatccactatgtcagagagcttgcaggaagtaaactccacggatgtgtcttttatagagttctcctgtgcaatggtttcatccacctgctccaagagaatacggattttatccattagtctcgtacggttccgttcgactgtcttgcgccagacaaaagtatatttgttggctttggattcaatcttagtaccgtcgatatactccacatcaaggctgatgaagcctttatcggcaaggacaagaaccaactgggtaaatacattatttatttcctcctttacacggttacgaaaacggttgatcgtgataaaatccggatgctcattaccggcaagccaaatataatgaatgtcacgaaggaggtgcttctctattttacggcaagaatagatattattcatgtaggcgtagattatcaccttaagcatcattttaggatgataaggacaacggcccgtttccttataaagcttcttgaaactctcaagattgaggttgtcaataacagcattcacgatgcgaaccgggtcgttcgcagctatgttttcatcaattctttgtggaaaaagaacggtttggttgggaatgtaaggacgaaaatgtaactttgccataacgaaaaactttatgcctaaagatacgaaaactttgggtaataacaaagcccgggcttgagaaagtctgggctttgcgcataaaaaaaggctgtgtcagcattttgacacaacctcttctttatgatataaacttattacggttatcttcttaactcattatatcaaccaagctaacagaatactccgcaactattttccaacttatttctttggagaagagtatcttgcattcagaccgtccaaaatttcacgggtaatgttataaatgctgtcggcatacaacagattgtcaaaaccggtgttgctgataatcatactgtaacccttagtcttgttatactccttcaggaaagcattgatagaatcacgcaactgcaagctgttcttttcgttctcgctcatcagttcagcctgcaacttattacctaagttctgcaaatcctgttccaatttggcaatacggttatactcctgctgggcgcgttcctgcgtcaaataagcgttgttctgaacttttgtctggaattcctgtttctgacggtcgaggtcctttgctttctggttcaaagtcaaacgtacattttcgctcttcttcaccattgcctcattcaaatcgacgcagtagttatattttgccaaaagcgtatctatttctacataagcaattttcattccggacagtccggctgcctgtgctgatgcattagtcgtctgattatccgctttaccggcgcattgagaaaataaaacgattagtgcaagagctgccaaaccgtttacgaggtagtttaatctcttcataatttgtaaaaatattgtttttagtttatttagttcatactatcgtttaaggctttctccagttcatcgatagagaagcggcttttcttctgtgcttccctgtcttgcgactgcacgcatccgattcctctatcacgcatcgccttattaccgctgacatgtccgttaggaaacttaccgcctttcacaaaaaagaccttcacgcccaataaaacaatgcaaatagcaactattaacaaagttatcaataatgtaccaagcatttccattaaatttgttgcacaaaacagaatatcgtccgataaaaagcatttgaaatttgtttttacttttatcagcactgttttgtgggtgcaaatatagggctttggttggactaagcacccttttttactctaaaaaaagagaaagggaaataaaatagccaattaatttaaccatatttagcaataagaggttaatttgtacaagataacagaagatcaggatacgcttcacttgtatcctggctgctataaactattaagatatggaaaaaaaagatttgaaaccggctggcgtattccactatttcgaggaaatctgccaggtaccgcgcccttccaaaaaggaagaaaagattatcgcttttctaaaagcattcggagaaaaacataagttggaaacaaaggtggacgaagccggaaacgtactgattaaaaagcctgccactccgggcatggaaaaccgaaagaccgttgtgctacagtcgcatgtagacatggtatgcgagaagaataatgatgtgaagcatgacttcctcaccgaccctatcgagaccgagatagacggggaatggctgaaagccaaaggtacgacgctgggggcggacaacggtatcggtgtagccaccgaacttgccatccttgccgatgacagtatcgaacacggacctgtcgaatgcctgttcaccgtagacgaggaaaccggactgaccggtgccttcgccttacaggaaggtttcatgagcggtgacatcctgctgaatctcgattccgaagatgagggagaattgttcatcggctgtgcgggcggcatagactccgtagccgaattcacctataaagaggtggatatacctgccggatatttctgctgcaaggtacaggtaaaaggacttaaaggcggacattccggcggcgatatccatttaggcctcggtaatgccaacaaattattgaaccgcttcctgagtcagactttcaagaagtacgatatgtatctctgcgaaatcgacggcggcaacctgcgcaatgccattgcacgagaagcacatgccgttatagccatccccgaagccgacaagcatgcgctgcgtaccgacttgaatgtattcgccgcccaggcggaagccgaatatgctgtagcagaccccgatttgcagtttaccctcgaatcggaaaatccccgtgccaaagctatcgacaaagacactgccaaacgtctgttacaggctctttacgcagctccacacggagtatatgccatgagccaggatattccgggtcttgtggaaacctccaccaatctggcatccgtaaagatgaaacccggtaacatcatccgtatcgagacaagccagcgcagttctatcgagtcttccaaacaagacattgcgactatggtacgtaccgtattcgaaatggcaggagccagcgtatctttcggcgacggctatccgggctggaaacccaatccgcactcggaaatcctggaaattgcggcggaatcatataagcgtctgtttggtgtggatgccaaaataaaggctatccatgccggactggagtgcgggttattcctcgacaaatatccctctttggatatgatttccttcgggcctaccctgcagggagtacactctcccgatgaacggatgcttatccccactgtacaaaagttctgggatcacctgcttgatatattgaagcatatccctgccaagaattgatgagcttacataaatggagatataaagaaagaatgcggagcaaaagaggacatgctccgcttctttttatcccgctatccgctctgatgcttcttgctttcctgacttccgctccactccacggacaagagaagaaagatactcttaccttccgcatcatgggttacaacgtagaaaacctgtttgactgccgccatgataccctgaaaaacgaccgtgagtttctgcccgatgccgtccggcgctggaactataccaaatacaaaaagaaactgaatgccattgcacgtgtcatcattgccgcaggcaaatggacaccacccgcactggttgccctctgtgaagtggagaacgacagtgtgctacgcgaccttacccgctactccgtcctgcgtgaggccggctaccgctatgtaatcactcactctcccgacgaacggggcatcaatgtggcgctgctctatcaaagaggcatcttcaaattactttcgaaccgaagctatccggtaatgaaacctcgcagaaacagccgccccacacgcgatattctccacgtcagcggacagcttttaaactccgatactttggacgtatttgtcgtgcattttccgtcccggtccggcggggcaaaagcgtccgaaccgtaccgcctggcagcagcacaaagattgaaagacacaacagacagcctgctccggatccgcacccgcccccaaatcatcattatgggagatttcaacgactatcccgacaacaaatccatacggaagatactgaaagccggaataccgcccacagaaacggactctttggattcccggatgctttaccatcttttagcaagaaaaggcattgacaacaagcatttcggcagctacaaatatcagggggaatggggactgctcgaccatatcattctttccggcagcctgctgatgccaggttctcccttatacaccgcagaggagaaagccgatgtgttccgtgctcctttccttctgaccgaagaccggaaatacggcgacgaacaacccttccgcacctactacggcatgaaatatcaagggggatacagtgaccacctgcccgtatgggcggaattccgcctactgtattaatcggaatactggtagagctttaaatcgaacttgccgactattgccagcaaatgatcgaaaatatcggactgaatgcgctcgtattctctccagaccttattgcgggagaagaaataaacctgtatgggtactccgtaagtggtcggttctttctgactgataatcaaatccatatcctgattgacaaccggaaggctgcgcagatagcgttcaatataaatacggtaaagctgcgagttagtgggtacttccccttccgcgggctgataatccgccatcagaggtacattcttacggatagcatccaagtcttccggcgtacagaacttcaaggtagtcatatccagatagatatttttattgacccggcgtccgccactctcctgcatcccccgccagttctggaaagagttattgaccagcgtatagggcggaacggtagatatcgtctcatcccaattccggatctttacagtgttcaacgtgatttcctcgacagtaccgttggctactccattgggcaactgtatccagtcgccgatacgcagcatatcattggcagaaagctgtacccccgccacaaaacccagaatactgtctttgaataccagcatcagtacagccgccgatgcgcccaagcctgcaaacaaagtcatcggggacttattcaccagcaccgcgattataacaatgcctccgataaagaacagcaatacctgaagaacctgcacaaaccctttcatcggacggttcttctgcttgtcccttgcattatatacatccagcatcaccagcaacaagccgttgatagtgaacagtatggcagcaatgatatacaccgcacatattttctgtgagaagtccagtatctcttttccccgcacaaaggccaggggcaataagaagtaaaccaatacaccgggcaagatatgaataagatgatgcaccaccctgcgtttcatcagcaatgtattccactggtggggtgcacgctttgtataatgtttcatcccccctacaaatatagcctgacacagataatccagccctatcgatacgcctatcatcaatacggcaatgatcgtctcgtcaaacatattcgcaagtttcgggtctactccccaatcgatgaggatttcgttcatccagcttcctaagctcaccataagcattctgtttttattagtctgtcgataaggataacaaatccaaaggaaagatgtttattcacctttgccccaaagaagcggacaaagcaagccgctacaacatcgcccgtatcagtgcataagccagaatgccggatatggtaattccccctacccagattggaacatagatatgctcatagctctctttacgcctatacttacacaaccggctgaaaagccagtaacagagagaagcgcctacaaagcccacaaaagcacctaccagcaagtcgccgggataatgtactcccaagtaagaacgggaatagcacgttaccaccgcccatagcatgatgaaccagttcaaggcacggttacgaaacagataaaacaggaagaaagccagaccgaacgtattggcagcatggcaggagggaaaaccgtaccgaccgcccctataaccgtttactatctgcacgaactccgaaatgggattctccagattcgccggacgaagcctgcacactaccggacggataacggttgcccccacctggtcggcaaaaacaatggtcagcgcaatagccatgacacagccgatggcaactttccaatgcaggttgcggacaattacataaaggatggcggcatacaacggcacccaaatccacttcccgctaaagacatacataaaataatccgcccattcggcacgccacccgtttattgcgagcaacaagtcggtgtccgtttcgaccaaccccgacaaaacatctgctaatatcattctatcttttggctatatcgtcatacaacttctgcagataggcctgccccaaagagaggttttgccctttcttcgggccttcatctacaacaatcgcatccgcttcattattaaatatcaattggttgtccggcgtcaaaaagccgaaagcgtccggcacggtaaagaaagcaaaatgaggagaagccggattgagcatatctttgctgaacgtaaactcaccgtgcggtatcgataactgcgctaataacgtagcggcaatatcctgttgggaaccgtagacatcgatacgttccggtccgcgtaccgccccgcccactatcagcagaggaatccggtatctgcccgtttcaaggtttccgatacgttcgggataggcccccaagtggtcgggaaccagtaccactgccgtattcttccattgcggcaacctgcggaactgtttcacaaaatcaccgatgcaactgtccgtatacgcaaaagcattcaaacgttcgttcgccaaacggctgtacggaacttcaaacggctcatggctgctggaagtctgcaacacacggaaatgcggcgtctccctacccgccagggtactgtcggcagcttccgccttcaggtcgtccagcaaacggcggaatacaagatgatcgtgcacgccccacttgctcagacgctccgataccggaaagtcccggtcggcaacaatgtcctcaaaaccggacgacatcagataggaacgcatattggtgaagtcggcatcaccgccataataatatttcgtcctgtaaccggcattcttcaaactgcctgcaatggcagggatagactgcgtcttacggggatacttcattatgctggtagtgggctgtgccggatacccgctcaatatggcaaccaacccgcggtcggtgcggaaactgttcgcatagaaattcgtgaagagaacgccctcttgcgccagactgtccaactgcacggccacgccgggttctcccccaagcgtcgtcatcagccacgaagagaaactctccatgatgataaagagcacatcgggacgctttgtcgtaaacaacgaatgcaaagaatccggagcctgctgcagggaatctgtcgaaagaccgtcccgcatcggaacggcagggtctgccaaaccggaaaaaatacggtcggccgcatccgcttccatgaaacggtattgactgccgaagtccttctgcttagagagagactccattaagctgaaagccggattaatggcggcatggttcaagcgctggtcggtactgaaatacaccttcccggtattcatggtggagactgtaaatccgccgcgaatcgggataaacaataatccggtcagcagcaacagtacccccgataccctcaaacgccgataaggtatcttcatgcgttcgaaaacccgtttccgcaacagcacgccatggaatatcccgtataatgccgccgcataggcaaccattgcaataattcccccgattaccacccatatactgacacttgccaccgcatctttgggcgaagaaaagaaatagaacagaggcgtagcgtccaaccggaatccccagtattcgtataatcccaaatcgacggtaaatataacggagagcaaaaccgaaatgaaagcaaaataaccgtaccatatacggcgaagaagattggataccgtccaggcagaacagataaagagcaatccaggaacagcagtcagatagcctgcaagcgataagtccaacggaagtccatgccacatcacacccaaccactccgtccacgaaacgccctcgtacaaggaacggtagaagagcataaaaaacggtttctgtaatgcgaatatacagataaacaagcagtatgtcttgagaaatcctataagcctatctttcatcggtgctttttcttaaactgaatatattcggcaaaaataaagttttttattctatttctcgccaatattggttaagaaatgcgtgaaagataggcttataagaatttaagagctatccgtttacacgtttatagtcttccagaaacttctttaatccggcgtccgtcagcggatgattcagcagtccttttatggcggaaagcggacatgtagctacatccgcccctacctctatgcactggatgatatgcgccgtatggcggatggaagccgcaagcacctgggtagcgtagccataataacggtatacgtccacaatcttacccaccaaagcgataccgtcttcactgatgtcgtcaagacggcctacaaaaggcgaaacgtaagttgctccggcttttgccgccagcagcgcctgccctatggaaaataccagtgtacagttggtgcggataccttttcccgaaaagtatttaatggcttttatgccgtctgcgatgcagggtactttcaccacgatatgcggattgagcgcggcgagttcttcaccttccttaatcatgccctcgtaatcggtggcaataacctctgcactgacatctccctgcacgatgttgcagatgtctacataatgcttgcgctggttttccacgcctttgataccttctttcgccatgagcgagggattggtagtcactccgtcgagtacgcccatatcataggcttcccgaatctggtctaaatttgcagtgtcgataaagaacttcataatataatttgtttaaggatttattttacaaatatagcgatttacgccatagtctgttctttatcagcaggatattttaacggttacgcgtcaggcacaaacggtgggttatcgtttccggcaactcgttctcgtaatgggtcaccataatcatggtcttgtccctacgacggcagaaggcttctatgattttcctgacgcgacggcggttgtacgtatccagcccgtgcagcggttcgtcaagaatcagcagttcgggatctttcacaaaggcacgcgccagcaaggcaaggcgctgctcgccgctggacagttgcaggaaaggcttgtccttcaaatgcgccacaccgaaaatatccatccaccactcgcacacagccatctggccggcatgcggacgtttgtacaaaccgatgctgtcgtgcagtccggaagctacgatttcgatggcaggcaggtttttcagataggcacggtgcatctccggactgacgtaacctatatgcttcttgatttcccaaatgctctctcccgtacctcgcttacggccgaacagacggatgtcgcaggcataagactgaggattgtccgcacataccagactgagtaaagtggacttgcccgcaccgttctcaccgctcaatgcccacttctgcccacgcatcaccgtccagtccagttctttcagaatcgtacggtcaccgtagcggatactgactttgttcagccggaccacttcgtccgaagtaaagttcatgttttcgtaaggaagaccggcaatgcgctgctgcaattcgcccaaagaagcgacatccgcctcagcacggagggcatcttgttcacggaaagcctgcaggtaggctgcacgcggcattttctctcccactgttttattgtcaacaggaactacgtgggtaataaaagacggtatatcatccagcatggaaagtaccagtacgatttgcagggaagcaagttgcgccagcttctccaagacagtgtacaacagctcgcgcgtagcagcatccagtccgatgaaagggttatccatgataaggacacgcggagccgtaagcagcgtcttggtcaactggaacttacggagttctccgctggaaaggagaataaccttcttgcccagcatcggttcgatacggaaaagctcaaacagttgctgtctgagagactcgtcctttacctcgcccagcaggtcgcacaccagcggagcatcttcctggtcgtgagcattccaacgctgctggtagtaataattggcatcggcggaaccgtaggtgtcacgaaaagcgatgtacctgatgttgtcgtaagcggtttgtgtggcggaaggacggaaatcgtatgtcagcgtaccgtcgcgcaagggatatttgcccgtaagcaaatcgaccaacagactctttcctgccccgttagggcctgcgatagcgatatgttcaccgtcgagaaaatcaagggttatggggttcgataaacggacaagcgggttgcgtgccacgccccccgctatatgtatggtatgttgttgcatcctgtcaatggtttgtggtttgaacggagcaaagataagagaaaaaaatctttttccgacatcgccactcctgttgttgtcacttcccgattccgttttcacatttttcaaactttcaccaattttgcggatatgagaaccgtataaccacaaagtaaggaaaatagaaattcaaaatctgttagccgatgttgaaaaacagaaaacggcttaaaaagccaaaacagcccgtacccggtcaagcatattgcctttaactccattcgacacgtagccaaggtacatatttacaaaaaatgcattgtcgccattatccggaacttctgaagaagaccaataaagagcttcaccaactttttgagcttcgaagtcagacaaagcctctaacttctcattgacaacgttgacattacttccggaaacatttataccgccatagtttccattttccgaccagccactttctacccagcccgaacagagtgtggagagttcacgtacagaaggaaaataccaaccgctactgctctgtggagtcggattgtcagaagtgtatgcagcaatttccatataagcttttaataaactgccactattactcgcatcatcattccatgccttcattgcctgtgtattgctataaccacatatatggcttgtttcggagacacctataccggtttgccgataaacggattgccaactgatgccagcgcttgcatccttcaaggcaactaccaaaccatgtgcagactttttaatactatttacttcatcccccattataatggttttggaagtatcgcttattttccctttcaatttactatcattctccgctacattacctgtatggaaaatgacacctatcggagttttcgtattgtcaagagttgtggaaaaagtgccgtcactgtaataataatcgcccacagtcgctgtgatattggaaatcagtgcacgagcaacacatgttattcttccgtctgtccccactatggttacctcaagcatggctttgtcgccaatatcaatgcccgcaggagcatgaacggtaataacagatgtataaactccctgtgaagcaacaggtttcgttattgttgcactccaaggcgttgcaacggctcgtgtccggatatcggtgccgacacccttgtcactgacgacttgaaccatgatagcagtacagtcgctttccctgaaacctgctggaaacgtgaaaggaatttcggtagtaaaggcagttatgattaaggcggaattagcctgccctgcctggtcgtcaccaatgtaaaaagccctataaaggggaagttctatcagttcagtgcaagttaccattcctgctgcatccgtattggttatagtaataataacagaattgccgctatcgtctactgtaatagagctggaagccccatttatcccgtctgtgccgtcaacgccgtctttacctatagcttttacccctgtagatgtccaagaagcacctttgtcgatagagatttcccattctttgctaactgcattgatgcggactttcggagcaacagcatcgtcacctttcataccggtctcgccccgttcgcctgtaacacgcagagggctaccatcgttgtccaatatataggaaccgtccaaagtccagtaataaacgccgccgttctctttcacgcctatattgggaacaatacctggagcgccgtcattacctttttcgccttgccttccgttctttattattacagtttcatttttcagaaaagcaatcatataacctgaaccatctggtaattcacttacacctgtaacgtaatcgttatcagcaagagcagcaataagactttgcatactctcgatttgcacgttagctgtcttctgccactcctcaagggcagaaagtcgggcattgagggcagtctgttctgcacgtatttcatcaaggctctgatgagcacaactgcacagtataaatgtggcagcaaacaataaaaataaactctttttcatgagaagaaattttaattgattaacggattagaaagtaaaatacagccggcaaatgcaagaatgcttcctgcaagaatatctttccgatacaattgcatcggaagcagcacttttcgttccgtacaattttccttatagaacatttcccggttggaagcatacaaggagtcttgagctgctgcctgtaactgcataaaggatgagagatgtgtttttttcgtcatgtggcatagtattaagttaaacatacaaaaaacgtgagtcgctgtatttgtttatcttatctatcaggccttcgcattgccttgcacttagataaacaacagccactcacgtcgttttgtatatagatacttttcttcccggtatacctgggaagaaagtaggtatataacacagacgtgagcgttgttgttatcaccttcaagtgcatttcaaagttgcgaagtttgatagacgaagataatttcaataacgcttcttacaaaaatatagatccattgcacccaacggactgttacaaagataaacagtttttcccaaccaaagcgggattgttctgtttttatttcacttttttcaggaatacctgaaactgccaccacttattacgctagcttgccaacggatatgctcattatctcttctcatttctcgcggatgcatcaccagtttatccccattaaacttcaggttcattaggaataaacttcaggtttattcctaataaactatcagtttaacctaagtaatcaggaataaactccagcattcttgtgcccaaagccctcttatttatagaaaataagcgcagactgtgccggaactgaaatctccggtccgtacatcgttcccaatcccttctcactgataaatccgtccttgcaaacaaccgtatatttgccttcgggtactgataccttagccgtttccttacgcgcattcaacaccacatagatatctccccacgcatcaccgccggcatgctctttcaaccgataagccactacgttgccgccctcagccggcaggaactccagatgtttgcgaaccagtccggcatctcccaggcggaaagccggatgatgtttacgcaactgaatcaatcctttataataagcaaacacatcggcatgctccgtcttgcgtttccagtcgatggcattgacggagtccggactttgatagctgttgtgtacgcccttcttatcgcgcatcacttcctcgcctgcatagatgaaaggcacgccctgcgaagtgaacaccgccgtttgcgccagcttatccaaccgggcaagctcttcgggagtgataccggggatgctggacttcagtctgtccaccaggcacatatcatcgtggcaagatacatagctaatcatctgcgtgggttgttccgcccagggagccttactgtaattcacttttccattatcaacctgcggatgcctgacagcaccgacaataccgaatttgatactctcctctccccccggcagtccggcaaggaaagcgccctgacggttatcgttgaacggaccgcgcaacgcatcacgcatttcgtcggagaaagctgcgatacccggcatcttataggtattggctttcatcgccaaggagtcctgcgccaattggggagccgatgcggcccatccttctccataaataaagatggtagggtctaccactgttgccgccttgcgtatttcgttcatggtttcgatgtcgtgaatgcccattaagtcgaaacggaaaccgtcgatatggtattcgtttatccagtgcaatacggactctaccatatatttgcgcatcatagggcggtcgctcgccgtttcgttgccgcatgcagaagcatctgcgaaaccgccgtccggagcctgacgatagaaatatccgggaacggtacgctcgaaattgctctcggccgtattgaaagtgtgattgtacaccacatccagcactacgcggatgcctgccttatgcaaggcttgcaccatttgcttgaactcacggatacgcacatccggtttataagggtcggtggcatacgagccgtcgggcacattgtaattctgcgggtcatacccccagttgtatttgttctcgtccagtctggattcatctacagaggcataatcataggaaggaaggatgtgcacatgcgtcactcccagttctttcaggtggtcgataccggttgccagcttgtccggatttgccgtacctgtttccgtcattgcaaggaacttgcctttgttccgaatgcccgaagaggggtctatggagaagtcacggtgatgtacctcgtagattatcacatcggcaggcgatgccagcggcggacgtttatcttccgcccagccttccgggtcggtttcccgcatatcgataacagccgcacgcttaccgtttacacctacagcctgcgcattgatacccggcgtatcgcccagccattttccgttgatttttacattgaaagtatagaacttgcctttcaaatcctgctccaccttagtcgtccacgtaccgtcttcggcgggcgacatggcaaccgtttcgtacgcatgtccgccctctcccgcatcatacagcatcagacgcacttcatccgcagtaggcgaccaaagcgtaaattgcgtagcagccggagcatattccatttctgccagactgcccgtacggaccggatagagttcgtacgacgcgtattctttctttgagggggcgcaactggcaactgttgtagccgcaactccgataatgacaagattgttcaatttcatggtagtatttttaagtataaaatattaagtataatatataaggtataggtcagcgttttactttgtcgggattcttggctatgaagtctttccagccgtgatatcctttctctgcaacaggacgccccatttgcagaaaatggcagtaggcagcggcaagcccgtcggtggcatccatgaatacgggcatttcctccttcggaaaatgaagcatgcgctgcagcatatccgccacctgctctttagatgcctgtccgtttcccgttatcgccatttttatcttcagaggagcatactcggtaatgggaatatcacggctcagggcagcagccatagccaccccctgcgcacgtcccagtttcagcatggactgcacgttctttccgaagaaaggcgcttcaatggcaagttcgtccggcagataactctcgataatacccagtacccgttcgtggatgtggcgaagtttcagatagtggtcgccaaatttgcgaaagtctatgatacccatagcaatcatttcgggcttggttcccgccacacgcagcaccccgtaccccataatggtagtaccggggtcgatacccaaaataattttttcctttaccggctgtatcacactatcacctccattaatgtcgggaaaccgattactttgtccttgaatattttcagtaattcctcgttcagcttcactccctgttcctgatgccaacgatgaagtatggctgaattttccacctcaaactgtacagagtaacagacacttccctcctcaatatggcttagtatgcgtgcaatgcgcggagcatacagcgcaccgtgcttctctacttcgggaagataaaattcctgcatccaggtgaggaagtatttctcctgtccttcctctacatgataggtcgtattatagatcaacataatttctttttgcattttattgcgcaaacatagcaattatttcagaataatgcattatatttgcgccatcaaataaagcaggtagttctgcaaacgttagcaacggggcgttagctcatctggctagagcgcgacactggcagtgtcgaggtgatgagttcgagtctcatacgctccacaagttatcaaaattaattatacaaatccttgaattccaagcattcaaggatttttttattttattttcttttccccattcttttatactcattcaaagaggtcgtaaaaagcaactcccgggtcaacgtaaaaacctgagggattcatagtttatgcataaattttcgccagtctgaacaggaagaaagctctgtcctttactcctctgaattgtgtgcggaactcctttatttttgcattgaacgattcggaagcagcgtttgttgaacgtctgtcaaagaagttgattatttcccggtaatgcatctgtacggaacgtgccactcttccgaaagcaagaaaccctgatttttccacctcgtcataccagcgggcaagatgcgtcaatgccgcatccttgtacctgcattggtggtatatcagtccgagcctcatggagaggtagtatgctttcttaatatcgggatactcccggaacaggatgccggcgcgtacgcgctgtgattccgtccacaaggattccttcttatataacaggtaaatgcttctcgaaagaagctgtttgcgtgaatcaccgttttcaaagaccggcgcatgatatatcttcccgcaggctttggcatgggcgatctgaacggattcttcgtccaaagcctcccaacgtgctttaacgcgcatatcctgaaccgcctcataagcgagtttctgcacatggaaacggtctgtgacgcggcgtgcggcgggaaaacagaggcgggcgatctgctccatgttcggagccatatccatggttatctccctgacctgaaagcgtctgcggcgggaaagacggagcagtacggaggtcacggtctttacatctgttcctttcacaacggcgataagactgcccgaacggccttttctctccttgtttatcaacacggtatataattctccgcgggaaaggcagacttcatccagtcccacataaacaccgatgttcttctcgaaaagaagccattcttcggcatgaggaagctgctcccaacagagataaccgctcaggtgattccggtattgccgctcgagcagttccccgtcgaccccgaacagcgttcccaacagcctgcagcccaccggcagcttatcaatataattcttttaaaaaagacgcaaattcatgcgtcatacggctaccaccggcaaccagtttccagtcacggctcacgtaacggttctcatccttgacaacccacctgcgccggcgcacgttcagaaaaagcttcttgccgcgtatggggaaatcctgaaccacaacaggttcgtaaaaacccttgctctcaactttcattcctgcgtattctttaggaacttcattcttttcttctaaataaatcactatttccgatgcgctttcctttacgtccgagatgatgaaataatccaatgtcccttcaggaagaaggagacggtagccgttgttgtccataagatttctgagttagttttatgcaaagataggatttttacaaatattacccctcaggtttttacattgaccccaactccccccagcgaaaaagaaaagcgcatattgccccattttatttggcttgcttataaatggaaagaggagcgatacaacatcgtgtactgctcctccttgccaatatatgaaaaaacaaatcccgactattgcacataacggaccgtactcccagtcctgcttttaacatcggcctgttctccttctaatagtatttcacggcaggagctgccgctcctttatattgtttattgacataaacacgtatccaatctatgtacatacaaggcatggcgctgttgtcccacagttcaggtttcacagctccggcccatgctttgggattggttgagataccggtactaaaaatcataaagaaacctttaggatcactccacggccaatcggtattaccattttcccctcgtttgtgctcaaaataagtagctccatttaccccacctactatacggtcgggataccattccaaccaatagatattccattttgacatatctctgatttcaatagacgaggtaacacttcctgcccccccaatgacaccggcataatgattttccgagtgcagggtgaaatgagcacggttgttcaatttccttttagggttctccaaaagatctatctcaccattggcaggccaaggaagattattattgcccataaaccacaacgcatcgttgaacccctcataggcattacgtttgaatcgcacctcaatgcgcatattttctgtaaaattacaccactcctcactacttccgggcagagcagtccgataacatccatgtgagaatttcacacgcttaccgaaacggttatccaccgaatcggcttcttctatgctacgaatctgcaatacaccattcttcacttccgaacaacggctgttatctacccgagcatcacgactcatatgcttgcctcgatgttcgatgaatcccaacggcagtccattacgggtatcccgctccagaaattcatgtgcagtgaaaaaactccatccatccaccgacggatgggcatccccaacttttaaagtaagcggtgcaccgggaacgggatagactgcagattcatcatctttagcaggtaaagcaacagcgaatattcctatttcagcaatcgatgtgcatggtttcccacttatttcagcaagaggaaccagacgaaagaaacgtcctctataactttgttcaaagtgtacgaaacaagtcacagggttatgcataatgttactgaactccccggatgtggcacatgttttccaatgcgagccatccatactgacttcaaaacggtacttatagatagttcctgccagattatcgtcctgcgcaggggtatagctaaatccggtgatttcggcatcgcgccccaaatctacagtgaatgttttgagcccttccgtacgccatactgtctgtacatttttatcaaaagccttccgcatagtctcatccgtaccggaaagacgccattggcttaccggcacattgcccaactgcactttagcgctattgtctgtcagcggacgggcataaaaaagtcccgtacgcaaaatgtgggctgcgttacgcgcagagcgtatcgtcagacgaattttctccggttggcactctgtaaaacgcaccaaacgcttgtagcccacagtagtaccttcggcgagtgtccgccaattcccatcccaatagccttccaataaaaaactttccacacgttggcctttggttatatcctcctgaatcataaatgtgtttacaagagcatccttccgtaccatgtattctttcgatgtacctgatagggcttcccaccgtgttctccccctcttcagataatctttttcaaaagtatttttgaggtaagtagagaactcttttagcctgcggcaatcattttcatggataagtcccgacttatcgggtggaatattgagcaataacaccgaattatatcctaccgacttgaagtagatatctgccagatgcgcaagcgattttacatgactatcctccttggaatggtaaaaccagcccggacggatagatacatccacctccgaaggaaaccaaaaaagctcttttgcgcgcgccacaatgtcccggcttcccaaatcttttgacttgccaaatacgcccagctccttattttgtcctatggcacgggaataaataccaggagtcaataccgtagcgctccattctgtcttacgtccgatgcccttctcgttgcctacccaacgaacgtcatcgcccatgacagcagtaaccgctttgggctgtaaacgccggattgtacgctcaatagcctcccaatcataaatttgctttttgccattaggcccttccccattggctccgtcgaaccacacttcatgcacctctccatagttggtaagcaactccgtaagctgctcgatgaagaaccggttataagcatcgccttgtccgtaacattcggcattgcgatcccagggtgaaagatatataccgaacttcaagccatatttcttgcaggcattgcgtaattcgcgcaccacatctcccttgccattcttccagggtgacgagacaacagaatgccgggtagtcttggtaggccatagacaaaagccatcatgatgcttggcagtaatgacagccatcttgaaacctccttctttcaaggcacgcacccattgctcgcagtccagtccggtgggattgaaaagcgcaggatcctccttgccatctccccattcacgtcctgtaaaagtattgataccaaaatgtaaaaaagccgttagttccatctgctgccactccagttgctgtggtgtgggtactaaccgggatgccatgtctattttctcctccaccgtagcttgtggtggaaattccaaatgcttttcgtaatattcctgtgcattggactgtgtataacagcccaacaacatcaaaactgaaaaaaatgtctttttcatggtcattctttttctattcaataattagctcatctatgcacactttcgtttcttgctccggacgaacatgcgttggcggattcataccagctccataggcaacaatacgcacatagcgagactcatcttttaaatcaaactgtacatcctctgtaaacataccctgtctgaatatttccgtctctgcaaaggactgttcttttattttccggtattgacgatcatccggcgatacccagacctctatcctgcgtggtttgtggatgcccatgccgtaactgttgttgaatcccattatgagtttctgcatacaggttttcttgcctaagtcaagggtgatgcagattgtatcgttattttcccatgacgcccattcaaagtcagaactgcgactgctccctctgactccgttaaccagcacatcctttgccggagagtccgtatatactgtacaagctgtcgccttattcaaaccaaccggcaacgtcagcgttttccccatgcactttccattgtaaaaagttgcacatttcagcaaagtgctctgttttacaatcagaggttttacatagcgcggagagttgaccgttggttcactcccgtccaaggtataggctatctccacatcgggacgaatacaatccagggtgacttgtaacttgccatcgcgaaccgttacagagtgctgaatattatacattgattgggcgaaattcactcctttgacggccaatcgttccgtaaaatgatccaatgctttcagaaagcggctccagtctttctttcctggtatagtccaccctacttcagccacagccgccaaccgagggaacaacatatattccacatcactggtccggttgcagaactctgtccacatagaaccttgcacacccatcaacagcgactttatcccatcactccaagtcggttccacaggttcataactataaatatctttcaatgtattatttccaaaataggtatatggctcaaaccattggggaccttgataacggataagatacatgacacgagcaggagtcattacaaagcgatgcccttgcccggctgcttttagcgcagcttcacccatacctctccagccgaatataatagcatcatcaggtatctgcgattgggtcagttcgtcccatcccatcacttcacgccccttgctttgtacatacttgctcatacgtcgcataaaatagccttgcaaatcttcctcatccgccagtttttcctctctgatacgtttctggcaaagcgggcattgcttccaatgcgttttccaagcctcatcaccccctaaatgaatataccgggaaggaaaaagcgccattacctcatcaagaacgtcttgcaggaaatgataaacattttcattccccgcacaataaatgatgtcagcatgattccccccgagtcccggcaacacacctatgaatttatccactacaggacaagcaagcatcggataggctgcaagagccgcattgctgtgtgccggcatatctatttcaggtataatttcaatgcaccgtgaggaagcatatgccacaatctcgcgtatgtccgtctgggtatagaatccttttttcacggtaggctcaccttgccgttggttgtgcctctcatggaaaagcaagccttcccgttctacacgacgggagcctacagccgtaagcaaaggatgcttttttatctcaatgcgccaaccgttatcatcagtaagatgcaagtgcaatgtatttatcttcaacaaagatatacaatctatcagacgtaaaaggtcttctttaggaataaaatatcgggctacatcaatcatcacgcctctgtacccgaaacggggactgtcatcgacggtagcagccggtacgctccagtcgacattcattgcacgctctcctccctccagctctgaaggcagaagttggcgcaagctttgaaaggcatagaacgccccttctttactcgatgtatacacgttaatccgcttaggagtgatgaccaggcgataagcttctttttttaaggaactgtcaaaacgaaggcagacgtcaccggctttcgctgttgttttcacttgaggagtaaagcctgcaggaacattgaacagcgaggcgaactgttctgctacagataccatagctgtatcctctacggtgattaccgtactggctttaaatatgaaattacccttttcaagcgtaaaattctccggtgcaggtacaatttctaatttttgcatcttgcgctcttcacctctgacataaagaatgcagacacacaaaaagaagaaggtcaaaatgaagatattttttttcatttctatatttatatagtgaaaaatcagtctctatcacgttccggcgagaaccgcaccggatcgttatactgctcttgcagctccagcatggtttctttcaaactatctacaattgacgcatagtcgctgtttccgtataaattatgcatttctgtaggatcctccttcaggtcatacagctcccaagtgtcaatatcattgtaaaaatgaataagtttgaaacggtctgtccgtactccgtaatgacgtttaaccatatgctctgccggatattcataaaaatgatagtacaaagccttgcgccaatccaccggatgctcacctctcaatagcggcagcaatgatactccgtgcatatcctcgggtactggaatgccagcaagttccagaaaggtaggagcatagtcgatgttctgtaccatctcacggatttctccttttgcattcaaccctttgggcagatgcataagcaatggtgtgtgcatagactcctcatacatgaaacgtttgtcaaaccatccgtgctcacccatgtagaatccctgatcagaggtataaaccaccaatgtattttccagcatacctttgtcttccaaataatccagaattcttccgacattgtcatccaatgacttaaccaccttcatatagtctctcatataccgctgatatttccattccgccagttccttgcctttcaagttgagcttatagaactcttcagtaataggtgcgtaaaaatcttcaaactgcttgcgctcaagcgagtccatacggttcagcatacattcatatgtctttttcaaacgcgactcctgaccgtctttcagcattttcaaatcatatataagatccatatcttcagcaatgcccatttcctgagaagcagcggcaatacgtccttcgtaatcatcatggaaattttccggcaatggaaagactttatcttcgtaaagtgaaagatttttgatttccggtaaccaattccggtggatggctttgtggtgaatgagcagacagaacggcttcttcttgtcccgtgagttttccatccagtcaatactcatatctgtgataagattcgttatatatcctttcttccggatagtgtcgttgttcatgttaataaaatccggattgtagtaattaccctgaccgggaacaatttcccaataatcgaatccagtaggaagactttccaagtgccacttcccgataattgctgtctgataaccgttttcacgcaaaattttcgggaaagtctgctgagtaccatcaaatacgcaagtactattgtcgtaaaacttattaccgcaactgtgtttacctgtgagcatgcaggcacgactaggcccgctaagcgaattggccacaaaactattggcaaatcgcactccatcagacgcaatacggtctaaattgggagtatgaacataacgacgatcatagcaactcatcatctgtgccgtatggtcatcggtcatgatgtacacaatattatacggcttatatttctgttcctgcttttgctggcaagaaaaaagtgaggaagatacaatagtcacccctgctactgaaaaaagtacatgtgttgttttcattttattaggattacgaattatggattacacacactatattattaattccgtctgcaaaaatggcaagctcttatatagattacagccctatatttactataaaaactccaataatcgctattttcatattattttgattagtatggagagtgcatcccggacttagcttaataaataaaaggaggcacagagcaaacaactactctatgcctccagcaaatatctgcaaaactgctactaaggcaaaaatagattaataaccaaagttgttgtcatctaccgtaataccttcgttataattgatttctgacaaaggtatcggcaatagcagattcttcttcaagaagtcctgagttaatgctccaccttccgcttcgttataaagacgatcctgcttattattttttgtttcctgatacgtttctaccgaggctctcgttatctcatgattattgtgtttttccaaggcttttttaaagagttccacacctttcaaccgtaccatttcatacatattgggctcacctgcaaattcaaagatccgttcgtaatacagatgctctctcacttcatcctgcgtcaaagtcttcggccagtcagccggctgagcagaagtccctgcagatgattgtcgggcacgtgtcagtacctcattagctaaatcaatagcacggtctttctgccccaattcattatatacatcggccatcaaaagcaacatttcggcataacggtatacaatcagatttttatgactgcgtgtacccgtagctttcttatcgaacatttttccgaaatagggagaagcgtgttctttgccagaagctgcataatctgtttgtacactttctccaatacgggccaaacgtgtggagtcttttagagcctgacctgtcaaaggaacctttttatcaggattcattgcctccgccatcttggtatagtcagcaaattttgctatagaaggattcgaagggtcttccatgtctgcataaggaagttctgctacaaaatcttgctgtagcggtatgccgttttccattactggttttccgtctttcatcacatagacacctttcaccttatatgtgatgtacggataagagtaagtagagtcgttggcacacggttggtcgcccttttgcggtacatcatcagcctgattattcttatgctggcgccagctagtaaggaaatttatttccaaacggggatcaccgggataggtagcacgcatccagtcgtaaagcgctttggttgccttgtacgtcccccatgcgataccactgtttgagtgagccggagcaaaacggttacaagcacgattgaataccaaagtggactctgcgttatagttcaattggaagattgattctttacttccatttacattgtctacaaacaagtcgccaaatttcggttgaagttgatattttccgtacacttcatcaaacatggctttggcattgttcagattcgtttgtttatcaatgtccaagcaagccattttatgatacactttgcccaaataagccttggctgccagacttgtggcatagccatcattttgtgtttccggtaacaccaaagctgacttgaaatcatcgataatcaatccgaacacctgttctttcggcgtacggggcatagcgattccatcggaagaagaggctgaagttctcatgggaacgtcaccaaaatgggaaaccaagttgtaataggcaacaccacgcaagaaacgtgcttctgcccccagcttgtttttgatatcatccgagagttcactcttgttcaaatagtcaaggaaagcattgacttcagcgattactttatacataccgttccaagcatactccacttgtgtactggaagtcaatacatttaaactgacattagggtcttcaccggaattacggtttgtccaagcaaagccagaagcgctgataggcaattcctgccattgctgaccatatccgttgggagcagccatatagccgtagcatcccaagagagcttgcctggcattggactcactgctgaaaatcaccaaattattttgggaataaaggggctcttcatccaaacaaccggtcaaaacagcactgccggtaagcaggaaagaaaaagcaatatatttaaaattcttcatattattcagtcatttaagttgttagtgtaatggaattaaaaagtaaggttcaaaccgaagatgtaggaacgcggtgtaggataagagttcatatccacgcccggacgaagtccgtcgaaggcaaaactgttcacttcagggtcataaccgctgtagtcggtaaggatgaaggcattcttcacactggcgaatactgacatgtttttcattccgattttggaaatcaggctcttgggcaaaacatagctcaatgtaatgtctgaacaccgaaaataacttccatcctctacataacgatccatcaccatgttctgtacctcaaagttggccgaggggaagagattgctggggttttcggcagtccacattccctgataagcttcagaagtgatgttgttggacttcatacccggtgtgtttatgtaacggttaccggtgttcaatatatcacgaccttgtacgccgttgaaagcagctttcagcgtcagcgacttccaggaaaggctggtctggataccataagtaaagtccggattgggattaccgataatatccttatccttatcatctaccacaccgtcttcgtttctgtcgacaaacttcacgtcaccggctttcaatgtctgccccatggcagtcttatagtaaccttccgttccatcagccttagtataacggatgcccttaccttctaccacatcgtcaacctgtacgataccgtcagtcacataaccgtagaactgtcccggagcttcacctgccaggaacacatggcctacaccgaagtggtcacccaaagaattaccaaagtaaccgactctttcacccaatgcaccaaattgtccaggcaacatacccaaatcaccgatttttcccttgttgacaccaatatttccgcttacattccatttccagtctttatggtcaatgatgcaggcattcagtgagaattccacacctttgtttgtcaatgatccttggttataataggttgtagagaaacctgccgaacccggaagatcccgactgataagcaagtctgtagttttcttattataaacatctatagtacctgtcaaacgggaattccaaaagccgaagtctactcccacgttccaggaagctgtcttttcccattttaagctattgtttgccaagttagtaatagtaagcgtattcaatgcattgcccagtttgtcggcatagataatactaccgccaccatacatggcaaaagtagaatacggatcgatactctggttaccagtgataccatagctcaaacgaagcttcaattggctcagccatttcaaactcttcatgaattcttcctgttccaaacgccaggcgatagaagcagagggaaaatacccccaacgattattcttggcaaacttgctggaaccatcggcacgaatagaggctgttatcaaatatttctcaaaaagattgatattcacgcgtcccaagtaagaaagcaactgataatctttctgaataggtgtctgatattcacgagaaccggccatgtgcataccattttcgcgcatttccattacagaaaacttggttccgacaacatttttgttcaagaaattgtaatcctcgtaagtcataccgactgtaccatccaaattaccccaagaacccagcttcgtattatacattaccagattctctaccgagtaattgctcttgtcaagattggaaatggccaagtaaccttgattattcataccctgatacagctccagaccataccagcgtttacgttcattggtattgatgttaccaccggtacggagattataacgcaaaaacttgctgattttccatgtcaggtccaaactggcattgaaagttttatcatcagccaagtctacataatcatttaaccaactgaataccgttgttttagcttcttggtcgaaagcagggtcgtcctccggcatttcatatggagcatagtccaaagccgtacgtgaaacggcacctgtagaaccacccaatgtattaccaccggccatcatatcgttctgacggagagaaccagccaaggacaaacgtagagaaacagccttggacaagtcggcattcaagttggcacgcaagtcaccttgcttcagtcctgtctgcttcacggttccctcaatatccttgaaattagcagagacgtagtaggtagtcttacctgtaccaccatttacagatacggaatagttctgagaaaaagcggtttgataaatttctttctgccagtttcgttcagccagcacatgataggattcaggtttatcaggatcataagaacctgtagcatcaccgaatacataacgtacttcgtcaccaaccaggtggaactgccagtttttctcatccgtctgacgcgaattacgatacaaggcatgctcacgcaaactcatcatattcaacagttcagaaggctctgcaatggtaaagttagccgaagcacttacttttgccttaccttccttacctttctttgtagtaatcaaaatgacaccattagcaccacggctaccatagatggcagtagaagaagcatccttcaatatggtaatatcttcaatatcggccggattcagcgaagccaaggggtcttgtgcaatctgaaagtcacctgaaataccagaagaagcaaattcaccggtagaagcctgcgggatattatcaatcacatataaaggttggttatcaccacgcaaagaactggcgccacgaatcgtaatagaggaagcagcgcccggagtagcagatgctgtatttactaccagaccggcaactttaccatcaagcagattgtctatagatgtcgctttcatagcctcattgccatccggacgcatggtagtcaaagcaccggtcaagtcacccttgcgagccgtaccgtaagccacgacgacaacttcatccaattgctgcaagtcgtctttcaatgttacattaatattggtacgattacctacttttatttcctgcgttgtatatccaataaaagagaataccaatatagaattggaatttggaacagaaacagtataattaccatttacatcagttatggtaccactggcagcaccttttacatgtacgtttacaccaggcatcgtttcaccattaccatcgtacacaatacctttcacttgaatggcctgagcgagagctgtggttacagccaacagacatagcaccatcacaagcatcgccttttgaagtctttgtctcatagaattaaatttaaataaatattgtcgtttcaacgctgcaaaattgcaaaacaatccaaaaaccgaagtacaaaaatcactattaataggtctaaaaatcactatattttcattgatagtatttttaaggactccagcttctgaaataaagcatttatgcccatttcatcggtattacattcatttccaaccaggaaaagaattcataaacttcactatacgaacaagaaatctatcgtttattcaaaatcagacatccattctgataggttacacgatagcttttccctttttgagtcttgaaaatcagcacagcgtcccgatatctcaatatgcaaggtgttcccgcataagaaataatgtcaacctgtcgcagctttccatctttccagcatacatccaatgaaaaatttccacgggcacaaagtccagacacagaaccatcactccaagcatcgggcaaagctggcaacaagtgaatgaatcccatgtgactttgcagcagcatttccgtaacaccggccgtgccaccaaaattcccatcaatctggaaaggcggatgcatgtcccaaagattattcaatgttccgtgttttaagagattaccaaaaagtttataagcatgattaccatcgtgcagacgcgcccactgattaagtttccaacccatactccaaccggttgctccatcaccccggtgttccagcaccactctgcaagcatcggaaagttcaggggtggttatcggtgataccgtatgcccgggatgcaaaccaaagagatggttcacatgacgatgctggtctttcggatcatccatatcaccggaccattccatcagctggccatagcgcccaattttataaggaaccaacttctccaatacctgctcccagtatttgcgttctttagcatccacccgcagcactttgctggcatcgatagcatcgagtagaatttcacggactactgcatgtacgaaggttgctccctggtctaccggaccatgttcaggagaagtggaaggagccgcagtataggtaccgtcgggtttatgccataagtaatctatggcaaagtttgcactacttttaatcagttcataaccgatttctttgagaaacttcacatctctggtgtagtcataatactcccaaatgtgtgttgccagccatggtcctgccatagggttgaaattccacgacatattctcactctccaacggtgtagtaaaaccaaagatatttccagaaatggaagccgtccagccacgagccccaaaatatgcctgagcagtcttctcaccaggttttaccaaagtacggatgaaatctatgagcggtttcatgcattcgctcagattggtagaacacgccggccaatagttcatctgtagattgatattgttgtgatagtccacacgccacggaccatctacattattatgccatataccttgcaaattggcaggaagattgctgggacgagaactggctatcaacaagtaacgaccaaactgatagtacaattgttctaaatagaaatctttttgaccttcgcgataacgactcaaacgttgagtaatcggcatatcacgaaaatcagatgaatttgtcaagttcagtttcacacggttgaacaatgctgtataatctgcatagtgagcttgatataacgcttcatagccttgtttttctgcctcatttatccaataagttgtcgtttcttccggatttactcccacatacgttttcggattagtgaagtcagggttgaaattaatcagatagtcagtatcagctgtaatcagaaataccacctcatccgctccttcgataaggagttggtcatgagtattcgttacagttccaccttgcgttaaaacccgcatacgcactacatactccatactattattatctaatctggctcgaaaaaccaatccatttttcccttcaggttgtaaagagcctgccgaaaccggattaggagcatagctgaatctaaggttctgtttagcagggcggtcagcactataacgcatcaccaaaacgtttgcaggataagatataaatgaagtacgcttatattttactccatctttgcaaaattgtactattgcacgggctgaatcgagcgacagttcacggcgatatccgcttatcccaatagtacttagtcctgtttctatgtagaattctcccatcgtcgtaaagttaccgaaccggaatgggtcttctttataagattcatatggaactgtactgttgaagttctggcaggtcagacgttcggccttttcttgattaccttcagtaaaggctttacgaatctcgtcaagaagataagcagactgcttatttacattccaataatacgccgctcccttagcggtattcggtcctcctctccataaggttttctcgttaaaggtaatacgttcggcttctattgatcctaaaatattagcacctatactgccattgcccaaaggcaaggaagctgattcccattctgcatccggattcttagcatggtctccagctgaaataggtttcttatccttccataattccggatttccaccataccatacagcatgaccgtttaacgtcgtgggagtatcaaaccagtaagacaagggtggttgtatgccctgaccataaacgccaaggctcattaacaatcctataaatataatcctgtttcttttcatattatccataaagtacataccaagcagctcacacaaaagagaatcatagcaatgagttgattcctgcgatagcatttccgcatccacttcttccatctctgttatttccggatttcctctactactgcacgctgtaaagaaagtgaattttcataatcacagtcggtggccaaatcccatgacatcacaccacgcatgtgctggccgagcggttacccaactatgaatcggcaacatactgaagaaagtttcgtctaacttatctttcaattcagtacccaaatacatattaaaataggcattcataaatgaatgatttaaatttccgaatcaaagagacaggaaaaaacattagaaacgttccctcagaactgcttgcacactacatttttaatctttcctttaaaaccgttcaagccatcccctatttgttgtaagggaaatatcagtgtctcctgatactccatatactccatacgcttatactgctgacgatagactttcttggtgcggccttccagacgttcctgcaacttaccgttcacataaagggaagtccccttgtaatcaccttctatacgaatatcactccacacaccttcgggcaaatgataggaatgaaacacaaatgtatagccgtcacgactgaaagccaggcagcctttgttttcccaattggcatacaccacagaatgaggtcccttgaatagtatggaactattgggagcattctcatcgggacaaattttgaaagatacagcatacggataccccacttcttgtaacacagtagaaatagaatcggttccgcttagcacacagacttccccggcaggggtaagttgcacttcaccagaagcagtctgacatacacctgacggtatccggcctaacagattcacgccgggagcttcgggcatctgacgacataaatcctcaaactgttcaaaagaaacctgacaattgctgcctttccacatcttttcagccaatacctgtagggctgggaaagaacgcacatgcacgtcttgttctgatataccgttgccgcacttatcattccacacggcaaacatgcctcccagtactccaacggtaccttcgggcaatgtcaactttttattaatcaaccatggtgaccaagtttcatacaaccattgatgatccagaaaatcacggtaataacctgctgagggtacgatataaagataagtgtcacaagagttaatcaacttatatccgtcttttaaagatgcttccgggtctatccagtcatacgaccatgcattgacagttactccttctgcctgcacaggtgtctttcccggaagccatttcaagccaccccacatacggggatttttaccgtatttcgcaatgtatttcaaataacggtctgtgaaataacgataccgttcagcctcctttttattatactcgtctgttcctatatgtacgtccggaccgataaataccggtgagtctccacaaagatattcgtccaacaatgtatccacaaaacgataagtctcctctttataaaggtcaagatgatccataccatattcttgactggctatttccggcttataatgagcaaaagccagagagtgggcggggatgtctatttctggaataatgtttactccataagctttccccatcttctgtaactctataaactcttttttggtgtatgccccgtccttggatgtcaatccaggaaaacgttcactctctaaccgaaaagcagcataggttttattccaatcattctcaaaaaattgcggaaacccattatcattcaaatgtatttgaaactcattcatcttgtaaaaagacaatatctttacatattgcttcagataatccatcgtgaagaactttctggcaacatccagcataaatcctcgattagggaattgaggataatcgcgtgcaatacctttaggaagagtaccttgatgattaaaaaggatctgcagcaaactgcgcgtaccccaaaatacaccttttacggcaggagcttttatacaagcataaccggaaaagtcaagcacatacccctcttctcccaactcctcatcaggtggagtgagggacaagcaaatatcgttcttacgaggttttccggtacgcaaagtataatcccaccccatcaattccttcaagtctgatataagaatacgagctgtagactctaacgcagcctcatcggttgtgcgaattacaatgctgcctcgtacaggcaaggaaagagttccacctgttccacgccattgttgcaaagccggaataacttgcggacaagattcttgagcaatagcagaaaggcttatacaaaacaatatgataaaaaacaaaattctcttcataaacaattgatactatttaaaattccgatatgtcaaaagtgcctcatcattttaaaggacgtatttcaaaactaaacagatactcttttacaggcaccaaataaggcgccagtacccccggtccgcaagtagccgttcccacaccgctttgcaaagcgtcaagatgaacggtcactgtgccatttcttttcaactcgttaatgtgcccggcagcatctatattctcatcagtgaaaggagatacactaaattcaaatggcttctccccccacacagacaatcctttttctaattcatcgctaacttgcatccaacgcacgtctgttcgattaccggtagcctgaggacgcacataataatgaaacattcgttctgcatcagtatgataaataccgatacgccccgaaagttttcggtcagcataagtctcatgctctcctcggcccaaataagtgacacgattaaaactgtggggcatttcaaaaaccagcccgacacgagccaatgaactgacaaacgttgtatccggaacgaaacgggtttgtacagacaatattccatccttgcgaatggtgtattcaaatgtagcagaccctattgtctcatttttatcattcaataatttcacttcactgtaagtagtgtgtcctgatgtttttacagataatacacgttggaccaaatgatttagccctaatttgcgccaaacctttgcgcctcccttcttttcacggttgtcattgtccgttgcagggcgatataaactcagccgcacaggcgaggcaagatattcctgtccttcatagatgtatgatgttaatgctccggttttcggatcaatctgaatttccggtttttcagacagtttagccaatgtcggacgatactgactattggcaggcaagacaaactgatcataagcaacctcatcatcagttccgatgaaagcacttttcttcttaggcgtccagcttaaattcagataagcctcacggatattccggggtaagcgtacgcctcccaatgaaacttcagtagtggcatgtggagcaacttctatagactgttcccctttcgctaacattttaccattatctcccattatgctccacttcaacacataagcattcagattggtaaagtcataccagtttttgatagcgatggttaaatttttaggatctttgagcgtgcatttaatatattgataagctttttttacctcttttaaatgaggatgcggttcccgtacagcattcaccagcccattacagcaaaagttaccaaaacttggtatattttccggtccgtaatcgccgccatacgcccaataccatttaccatgagcatccacctctctgaatgactggtcgacccagtcccagatacaaccgccttgtacgacaggttcgctctcgaacacttccatatattccttcaaaccgcctccactgttacccattgtatgcaaatattccgtcataatgaaagggcggtatactttcggacttgtctgatgggcataagccaacaactcatccacactacgatacatgcgacagtaaatatcagtattatattgttgttcagcacgttcatactgaactggacgactttgctctaccgatttcatccaatcgtaagtgcgttcaaaattaataccattacctgcctcatttcctaatgaccagattatgatggcgggatgattttttgacctctcgtacatccgttgtacccgatccatatgggctggaagccatgtgctatccttagcaagcgaagctgctccataccccatgccatgcgactcaatgtttgcttcatctattatatacagaccgtaaagatcacagagatgataccaatacggatgagtggggtaatgcgaatttcgcactgtattcagattattctgcttcatcagacgaatatcctgttccatcagttccttgctgactgtacgtcccaattgagaatgttcatgacgatttgccccttttaccaatatgggcacaccgtttatgcaaaatcgtccatctttgatttccgaggtacgaaaccctacgttgcaccctgtcagatgtatgatttctcctgaagtatcttttagagaaataatcaatgtataaagataaggatgttccgcactccaacgtttcactttcggtaaagtctctttctcaaaaaaaatgaaattgccgctttccttgctttgaagcggacaatccttttccagaatcgtttttccgcaagcatcttctaaacgatacgataatgtggcagcaccttcagcctcccctcctatggttgtttcaagagcaaaaagcccatccgtatacgtttctttatctaaagtggaagtcacttgatagtctgcaatatattgcttgggagtgctatacagatagatatcacgttctatgccgctcaatcgccacatatcctgacattccaggtatgcccccgcactccaacgatatacttccagggcaactgtgttctctccctcttttacatatggagtaatatcccattcagcaggagtcttcgaaccttgattatagcccaataaatgcccatttacccaaatataatagaatgaggtaacgccctcacaacagatgacggtccggcgatctttccaatccaatggtaaagtaaagctacgccaataagaacctacctcattttcatcatatggtactagtggtggattcttcttaaagttaaatagcgggtcatcgaattcgtaggattcattcacataaatagcagttccataaccttgacgttcccagtttccaggcactttgatgtcagcccatccacccgtataatatccaggcttataaaagtctttgggccgattatcaggattctttacccaagaaaatttccatctcccgttcagactcatataatagcgagaattttcataatctccttgacggatatttgtagctttgtcgtatggccatacataagtatgaggccgtaatttattttttccaatagcatattgactttgccattcgggaacagtagcctgagcagaaagtctaccgactccaaagaatattcccacaatgaggaagtgtagaaaaattttatagatgtaattcatcgtataacaaaggtattagttataataaatagttttttgcaaaagtatccgttccacaatgaatggaaggtatagaaatatctttttttgctccaaaaatgactatttcactcattatcgtataatcttcctatgctctataaacagcgttaatttattggtacaaatcttgatatacaataaattactgataccaaacttgacgacgattatacttgttaaaatagcggaataaatttataagattatttgcattattgaagcaaaaacaatatttttgttttacttttttatactatgaagaaaattttattaactgtacttgtttggatattgccaaccgtcttatggggaaagcaactaagtgacaaacaatatatatttcaacggattgacgtacgtgaaggactctcttatcaagtcaactgcatgacagtcagccaccgtacaggtcatgcctggatggggaccaaaaacggtatcggacgcttcgacggatatgaacaaaagaaatatttgaattgcaatatagaccaattggtagaagaccgcaataataatatttgggcacttggcagcgaaggagtttttctgtatgatgcggtcaatgacaccttttaccgggcatgtgacctaaatggaaaccttatatcagcctcctccatctgcctttgggatgacggcgtttttttcggaggatttgacaaattatacaaatatgattataagactggaaaaatcgctcttttccgttcgattacttccaatataaaattccaaatcaccgatctttaccgttttgacagtcatactctgttggctgccaaccgttgggtgggagctttgctgatagatattcgtaccggacacacacgtgatgtcccatttgattgtcgcgacgtagttacgatgctgcctgattctaaaggtaatttttgggtgactccgtattgtaaaggagtgcaatgctacaataagaatggtaaacttcttcacacctatcacacaggcaattcatcaatgcagagtaacattgtgcttgcattggctgaatatgatggccacatctggataggtaccgacggcaaaggaattgccgttttaaatcctgaaaacaatcaaatggatgtattaacacatattccgggagatgcctattctctccccagcaattctattttgtctttttatgcagatccggaaaatgggatttgggctggcagcgtacgcagtggaatgttcaatattaaggaagtgggcatcaaactatatgcagatgcactccttaatgccgattatggactcagcgagaaatctgtattaagcctttatcaagaacaaaacgaaaaggatatatggataggaacggatggtgggggactgaatgtgtttaatgccgataccaataaatttcgccatattccatctacatatggagaaaaggtagcctccatcacgggtgttgataaaaaccaccttttgatatcactctttggcaaggggatatttttctataataagcagactgaacattgtactcctttggttattgtaaatgatgatattaacaaccgattgtgccaacaaggcaagacagtcaatcttatgcaaaatacaccggaaactatcttactgctttccgagagtccatacagttacaactggaaacggaagacattcacccccattcatataaaccaccttaaagatgccatagtaggtcagttgctcccgatatgtgtaaaggaaacattttcttacctgcatgattccaaatgtatttatcgtatagaccataatgacaatacccttcacgtcctctatcactgtaaacaagataccatgatccattcggcttcagctgacgagaaaggcattatctggataggagggaactacgggttgggcagtttctcgcccaatgacggttcatatactcatatttcaaactcgttgattaacgaagcaatgtctgttgccagtgaccagcatggacgattatggattggtaataatgaacgtttgctttcctggatgaccactcaaaagcgctttatcctttacggtgttccagacggagtcgctcctaacgagtatctgccgaaaccccgtttactttcatcagaaggagatgtatatttgggtagtgtaaatggattattacgcattgcttccacacttcccaaagagcacccggaatctccggtgcttgaactatctgatgtatttgttggcggtgatcgcatggaatatatttcaggcaggaagcctgttttaaaaattccggagcaaagcagaacgataacgattaaagtaaaggcacacaataaagatatattccgtaagcctgcctattgttacaatctgcaaggatatgaaaaagagcctatctattcttatttgccggaactgacactgaatacgctgtcggcaggcacctatcagataactgcttcatgcactacccgttccggcgaatggacagataattaccccattattgaacttatcatacttccaccttggtaccgtacatggtggttcatattaacatgcatgctgactgccttgtcagcagtgggcttatccgtttacagctttttacgccgcaaagagaaccgaatgaaattagcaatgaaagagcacgagcaacaggcgtatgaagaaaagatacgcttcctgataaatatcaatcatgagctgcgtacacctcttacgctaatccatgctcctttaaaacaactgatagaacagtttcctgccaaagatgcccgctatagggttctacagaatattgcccgacagtctgagcgcatgaagaatttattaaacatggtacttgatgtacgcaaaatggaagtcagccaaagtaccttacatatagaaagcatcaatctggaaaaatggctggaagaagtagttgaagactttatacccgagtctacccaaaaacatataacactcacccgtcagctgtcagccggaatagaatcattctattgtgataaggaaaaatgtactactataataaccaatttattaattaatgcaataaaatacagtaatgagggaggagaaatcaatattattacttcattatccgaaaagaaagacagagtgcgtatttctgtttcagatcaaggtccggggctaaaagatattgatgtctcgaaactgtttacacgtttctaccagggtgagaacagtcgtcccggatcaggcataggactttcgtactcaaaaattttggcagaacagcaaggcggcagtgtcggcgcactcaataatgttgaatctgcaggttctactttttggtttgaactgccactaaacattaagcctggcaagcttattttacagccacaaccttatcttaacgaattgcttgcctctgctgaaaacattgagagtgtaccagacgagcctactttcagatccgaaactaaagattataccattctggtggtggatgacaatatggaattagtagattatctgactgatgcgatgaggccctattttaaagacgtgcgcacagcttataacggtgaagaggcgttagagatgtgcaggcagtggcatccggatgttataatcagcgatatacagatgcctaaaatgaacgggtacgagttgtgcaagcgggttaaggaagaattagacatcagccacaccccagtcattctgcttactgctcgaaatgatgaagcaagccgtatattcggttataaaaatggagccgatacttatcttacaaagccgtttgagataagtacgctctacacagccatatataaccaattgaaaaatcgtgagcgtataaagaaaaagtatattagcagcaaaacagcaccaacaccagaagaaagtacatttagcgccgctgacgagaagttcttgaatacaatgaatcagattattactgaaaatatcgacgagcctaatatgggagttcctttcctatgtgacaaactcggtatgagccgtgcctcactttataataagttaaaggcattaacaggtatgggagcaaacgattatataaataaattgcgcattgacaatgctatcaacctactactaaacagttcattaacagtaaacgaaatagcagaccgggtcgggttctctaccccccgctacttcagtgcagtattcaagaaaaacatgggatgctctcctacccaatataaggaagaacaattcaaaaataatgtacagaatatataagtcaacaggacaagaatgtccaccgaaggaaaaaatattggaataattgaagctacatcttagcggcacattatatcgaaagccggacacaaagtccggaaaagcattccggctggcagtctgagttaataaaaaataatatgcagcgattgaaggcaaaacaatgataaaattgtatctttgcatcgttttatgtattgaaagaataaataataacaacgatatgatagccagaatcaacgagcttctgcaagaagtagaagcactgaaagccgctaatgccgaggaactggaagcactgcgaatcaaatacctcagcaagaaaggagccattaacgaactgatggcagacttccgcaacgtgcctgccgaccagaagaaagaagtaggcatgcgcctgaatgaactcaagaacaaggcacaggaaaagattgtcgctctgaaagaacaattcgagagccgggacaacggttgcgaagaccttgaccttacccgttcggcctatcccgtgaaattagggacacgccatccgctcagcatcgtaaagaacgaaatcatcgatatatttgcccgtatgggattcaacatcgccgacggtcctgaagtggaagacgactggcatgtattttccgccatgaactttgccgaagaccatccggcacgcgacatgcaggatactttcttcattgaaaacaatgccgagaatgtatcgcacaatatcatactgcgcacacatacatccagcgtgcaaagccgtgtcatggagaatacacaaccgcccatccgcattatctgtccgggacgcgtataccgtaacgaagctatcagctatcgtgcacatgctttcttccaccaggtagaagcgttgtttatagaccgtaatgtatcgttcaccgacttgaaacaagctctgttgctctttgcacaggaaatgttcggcaaggacaccaagatacgccttcgtccttcctacttcccgtttacggaaccaagcgccgaaatggacatcagttgcaatatctgtggcggcaaaggctgtcctttctgtaaaggaaccggttgggtcgaaatcttaggttgcggtatggtagaccccaatgtactggaactgaacggtattgacagcaagatatacagcggatacgctttaggtatgggtatagaacgtattgccaatctgaaatatcgcgtaaacgacctgcgcctgttctcggaaaacgatacgcgcttcctgaaagaatttgaagcagcttattaatatagaaatcccgatatttctatattgggcataaaattgggatgtgccagaacctaaaaaggcactcaccatttatttttaggcacggattgcacggagaaacacggattaaatcaaaaaaaggaccgtgaagtccgtataatccgtgcctaaaagaaattatcaggcgtatttttactcccgattatttgcaactaacggtttttaatacagcctgattatcaatcctattaaatctccacccaatgaaagataggctcgtaactcccggctattgctttatcctcgctgccaacttcctactgtatttcggcttttggctattgatacccgtattgccattctatctatccgaagtattcaatgcaggaaactccactatcggcatcattctttcctgctatacggtagctgccttatgcatccgtccgttctccggatattttctggacagttttgcccgcaaaccgttgtatctgttagcttatttcatcttcatgaccatgtttgccggatacatcattgccgggtcactcactttatttatcctgttccgcatcatacacggcgtatcattcggcatggtgaccgtgggcggcaatacggtagtcatcgacatcatgccctcatcaagacgcggagaaggtctcggatattacggactctccaacaacatagccatggcagtagggccgatgtccggtttgttcctgcacgatgcaggcatgagttatactaccatattctgttgctcgctgggttcctgcattgccgggttcatctgtgcttccttagtgaaaaccccgtataagccgcctgtcagacgcgaaccggtttcgctcgaccgctttattctgctgaaaggcattcctgcgggtatcagcctgcttttattatccattccttacggaatgactaccaactacgtagccatgtatgccaaagaaatcggtatccatgcaactaccggctttttctttactttcatggcggtgggcatggctatctcgcgcatcttttccggcaggattgtagacagagggaaaataacgcaggtaatttcggcagggttgtacatcgtggtattcagtttcttcctgctctcggcatgcgtctacatcatcgagtggaacagcatggcatgcaacatcgtattctttgcagtggcattactgcttggcataggcttcggcatcatgtttccggcctacaacacactgttcgtaaaccttgcccccaacagtcaacggggcacggccacttccacctacctcacttcgtgggatgtggggataggcatcggcatgctgacaggcggatacattgcagaagtcagcactttcgacaaagcctatcttttcggagcctgcctgacaattgtttccatgctctatttcaacatcaaggtaactcctcattatcataaaaacaaattacgatgagaaagaaagaacgttatgaaaagatactcgcctggttcagggaaaaccgccccatagcggagaccgagctacattataacaacccgtacgaactgttgattgcggtaattctttccgcccaatgcacagacaagcgggtgaatatgataactcccgccctctaccgggacttccccactcccgaagcgcttgcagccactactccggaagtagtatacgaatacatacgcagtgtatcttacccgaacaacaaggccaagcatctcgtaggcatggctcaaatgctggtgaaagacttcaacagccaagtgcccgatacactagaaaagctcgtgaaacttcccggtgtgggacgcaaaacggcaaatgtaatccagtcggtcgtcttcaacaaagccgccatggcggtagatacccacgttttccgcgtcagccaccgtttgggactggtatccgacaaatgcaccactccgttcagcgtagagaaggaattggttaaatacattccggaaacagagattcccattgcccaccactggctcatcctgcacggacggtatgtatgccaggcacgtacccctcaatgtgacaactgcggtttgcaattgatgtgcaaatattactgccggaagtataaagttagtaaagagagcaatgatggggaagaataaacaatgatttaatagcagggaaaagaaataaatactaactttgccgtcacgaaaagaaaacggtaacacttttaaataaaaatagagtattatgacaattgatcaatttaactttgccggaaaaaaggcattcgttcgcgtggacttcaacgtgcctctggacgaaaacttcaacattacagacgatacccgtatgcgtgccgctcttcctacattgaagaagattttggctgacggtggcagtattatcatcggttctcacctcggtcgtccgaaaggtgcaaccgacaagttctctttgaagcacatcctgaaacatttgtcagaactgctgggtgttgaggtacagttcgccaacgactgcatgggcgaagaagctgccgttaaggctgccgctctgcaaccgggtgaagtgctgttgctcgaaaaccttcgtttctatgctgaagaagaaggcaaaccgcgcggtttggccgaagatgcgacagacgaagaaaagaaagctgccaaagctgccgttaaggaaagccagaaagagtttaccaagaaacttgcttcttacgctgactgctacgtaaacgacgcattcggtaccgctcaccgtgcacacgcttctacggcattgatcgccaaatacttcgacaaagacaacaagatgttcggctacctgatggagaaagaagtgaaagccgtagacaaggtgttgaatgacatccaacatccgttcactgctatcatgggcggttccaaagtatcttccaagattgaaatcatcgaaaacctgctgaacaaagtggataatctgattatcaccggcggtatgacttacaccttcaccaaagctcaaggcggtaaaatcggtctttccatctgcgaagacgacaagctggatctggctctcgaactgttgaagaaagcaaaagaaaaaggcgtaaacctcgtattggctgtagatgccaagattgccgactctttctccaacgacgccaacactcagttctgcaaagtaaacgaaatacctgacggctgggaaggtctggatataggtcctgagacagaaaagatttttgccgaagttatcaagaactccaagactatcctttggaacggtcctacgggcgtattcgagttcgacaacttcactcacggttcacgctctgtaggtgaagctatcgttgaggcaaccaagaacggtgcgttctcactcgtaggcggtggcgactctgtagcttgcgtcaacaaattcggtctggcaaacggcgtttcttacgtttctaccggtggtggtgcattgctcgaggcaatcgaaggaaaagttcttccgggtatcgctgctatcaacgaataacaagaacctcattcatacaaaaggcagctctttgaaaaaagggttgctttttttttaattatatatccgacacatgaaacgaattctactatcctgtcttcttctcctctccatacatacattaaaagcccaggatacgcgtctgaacaatgtagtgaatacactgaaagaacgcatcaccctggcagggtatgcccaagtgggatatacctatgatgacgccggcgaaaaggccagcaataccttcgacctcaaacgcgccatattcatggcacgcggcaagattaccgataaatggtcgtgctacttcatgtacagcttcgccaataccggaaagatactggaagcttatacggaataccggttcctgccccaactcactgcccgcatcggacagttcaaaacaatgtacaccattgagaatccgatgtctccctgttttgtcgaactgataaactgttattcacaggcggtcaactatctggcaggtatcaacggcagcgatccactctacggctcgaacagcggccgtgacatgggtatccttatctacggcgaccttttcaagaaaaagctgagttataaccttgccgtcatgaacgggcaaggcatcaatctgaaagacaagaacaatcaaaaagacatagtaggcagcctgatggttcatccgctcgactggctgtcggtgggcggctcattcgtcaagggcaaaggctgtgccgtagccgcctcttccgtcaatccggatatagcgataggcgacagctacacacgcaaccgctggtcggcaggcgccaccatacagacaaagcctgtcagcctgcgtaccgaataccttgccggcaaagacggacatgtaaaaagcgacggatactatgcaaccgcatccgtacatgtgcttcccaaattcgacattgtagcatcctatgattatttcaacaaagacaaagcgcaggattacaaacagagcaactatgtggccggtgtgcaatggtggttctatcccaaatgccgcttgcaggcgcaatacacctattgcgatccccacaaaggagaaaactccaacctgctgcaggcacaattgcaggtgcgtttctgatttatgaaaacattctggcattctttttgtacatttgtagagtataatcacttaatgaatacaattttatgaacgagcaagccatacaagagcaatatcagcatatagtcaatctactggaacagaaacgtctgaaagaggctcaagtacaactggaagcctttttatggaactgcaacgactggacgctccgcaaccgtctggagcaggctaaggtgtcctaccaatacatgttacagtacatgcgccagggcgtaaacgatccggaacggcagaaactataccggcaacttctggcagaaacctgggagcttgccgaacagacccgcatcagcctgctcgatgaggtttccacccgttattaccactccctgcacaagaacaaaaagaatatggtagccggttacggcatgtcttcctggctgaaagttctggaatcttttcctgacgatatggcggtttgccagcttatgccggacaacaaacaaagtctggacagcgccctgcaacgccatgaaggcactgcccaatatctgttcctcactacatggggcaacagtggctggacggcagaagaagaacaggaagccaggctgtatctggagtccgaattgttgccggtaaatgacttgtgtctgttcaccggagccatcctgctcagcctgatggaatgtttcgatccgcggaaattctcatggttactggatgccgcaacgcacgccgacacacaggtcaaccagcgcgccctggtgattatcgccatcatactgcacatacactccaaccgcttgcggctatacccggagctgatggcaaagttatcgcttctcgatgaggacggcagcttcggcaaacagttgaaccgggtttacatccagctactccgcagccgtgaaacagagaagatagacaagaaaatgcgtgaagaaatcattccggaaatgatgaagaacgtcaccatcatgcgcaatatgaagtacggcttcgaagaaaacattgatgaagacgaccgcaatccggactgggagaaagcattcgaggaatcgggcctgggcgacaagatacgcgagatgaacgaacttcaactggaaggagccgatgtatatatgagtacgtttgcccagctcaagagttacccgttctttcaaaatccgcataactggttctatccgttcgacatgcagcattccagcatcatacgggagttcggactgaagccaaccggagaaaacgccgtcctgtcgctgatactgcaatcgggctttttctgcaacagcgacaagtattcattatgctttaccatggcacatataccgcaagcgcagcgtaatatgatgctcagccaaatgacatcacaggatttgaatgaactgatggacgagagcaagtcgtccagcctgagacagtatgccttgcggccggacgttatcagcaaccagtatatccacgatttataccggttcttcaagttaagccagcgccgccatgagtaccgtgatattttcaaggaagaaatagccctgcaccgtataccggcactgaaagatattttatgcaagcccgaactattggcaaccatagccgacttccatttccgcaaagagcatcccgcagaagccttaagcatctataaagaaataacggatatgaaccatgccgatgcggaaatcttccaaaagaccggctattgcctgcaaaaagagaaacgttacaaaaaagctatcgaagcttataggaaagccgatgtactgaaacccgatcatgtatggactatccgccacctcgccacctgccaccgccaattgcgggactttgcaacggcattggaatattacagaaaagcggaagccatgcaaccggaaaacagaaacctgccattccttatcggcagttgcctggcagagcaggaacgctacgaagaagccttgcagtatttctttaagctggatttcatggaaaacgactgcatcaaggcatggcgtgccataggctggtgctcgtttgtcagcggaaaatttgaacaggccatgcggtattacaacaagatacttgccttgaaaccgctttccacagattacctcaatgccggacacgcagcattgctattgggaaatatggaaaaggctgccgaactgtacggaaaagctacctcggaaagcgataaccgggagacttttcttgagatgttcgataaagacaaggagatgcttatcaagttggggatagacgaaaaagacataccgctgataagagatttggcctgaccagacggcatacctgtttccataaagaaaagagaatgtgtcaacatacacttgatgatttcttttaggcacggactacacggagttcacggaaaaaaaacaaagaaaatctgtattttccctgtaatccgtgcctaaaaagaaacaaacagcaagcgaatttcagttttgacatatcccctttcattggcagaaaatgccagataagcaaagcttaacagccctactattttaccttgacaagctccttataaagccgctgcaccggcagccccataatattataatagcttcccgaaatattctccaccccgataaagccaatccactcctgcaccccataggcaccggctttatccatcggctggaacttatctacataataggttatttcttcttcgctcagctcagcaaagcgtacttccgtctgagcggcaaagctgcgctgccattccgttgtagttatacaaactccggtaaacacttcgtgggtgcgaccggacatatcccgcagcatgcacaaagcgtcttcccggtctttaggtttcccaagcacccgcccgtccagccagacaatggtatcggcagttatcatcagttcgcccggttgcaacatgttccgataggcatccgctttttcttttgcgatataaagaggtatatccgcaccctgcaatgtatcagggtacgattcgtctacatccggtagggtgcgcacttcgtagtccacaccaagtcctgccagcaactctttccggcggggagaattggaagcaagtataactttatattttttgagattatccaacatggctttaagtagagttatgaattataagttatgaattgcgagaaatcaaaccggcagaagttaccaaccgaaggcccgctcgtctgccatccaaagacctttcactttcaggaactgctccacgatatcccgtccgcaaccgtatcccccctctttgtgggagatgtagcgggcaacggattttacctcaggggcggcatcccgcggacagcaaggcaaaccgcaagtgcgcatcacctcaatatcgggaatatcatcgcctacatatagaatttcttcatcccgcaggccgtagcgatcgcggaagtcacgataatcgtgtatcttgacagaagaccccatatagatattctccggcaatattcccaaagcacggaaacgcttgcgcaccgcttccgtgcgtccaccggtaatgatagccaatggtatttcatgtctggcagccagatgcaaggcatagccatcctttatgtttaccgtacgcagcggctcgccttccgtactcatcggaatgacattggcgctcaacaccccgtccacatcaaaggcgagggcttttatcttattcaaatcgtaattgattgtactcatgccttattctttctaagaagttaactattttgccgatgtatgctttcgctaatcagcctgtacagttcctgcatgtccggctcgtcggaaagcatctgcaagtgctcgccaataacattttcgtcataccgcacggcaggccccgtctgcgcaagacgcggttcgagttcatgcaccttacgggcagtctcgtctatcaaaggcagcatcacttcaaaaggaagcccgtatttcttcaacaacccggctgcaagggcatacatatgattggtaaaattacaagtgaacaccgctgccaggtgcagacttttacgctgttcggaatcggcctcatagacattctcggagagtacggaagcaatatctttcagtgtccgggtatcctccgcagagttgctttccacgaaaaccggtatctgccggaaatcgaccgtacgctgcttgctgaatgtctgcatcggatagaacacgccataccggtttaccttgcctgcccaaacatccatcgggatacttccagctgtatgtacccacagggcattttcttttccggcaacaatttcgggcagcagttgcacaaacgccgcatctttcagcgaaacgatatacagccgggcatccgctgccacagacgacaagtcggtagtataggcagcctctaccgcctgcgccaatgttcgcgccgactcttccgtacggctgtatacctgcacgatacggaatcctttatagtaaagcgcctttgccagattcgtagccagattgccggctccgataaatacaacagatgtatcttctatgcttcttttcatcttatctcgtagataccaaatacaaaataccgcctacaaccaacagtgccaccggcagcaaataagcggacatagtaccgagcagagccgttatcaatccgaaattcaatatcagccacaggcccgtcagcaccagtcccaccgacttgtcattcttgaataacaggaagatgaccgccgtataaagcagaaaattatcccggttcatcacccacgacagtcccagtgtggagaaatgcagcagtttgtctgccagatagagcacgccgaacacaatcagcgtgatagccgtagccttataggtatctttattgttatttgctttcgccgcgctcaccgttactttcctccatatttgttaaggtgaatcttttcccattgcaggttgtcctcattgaaaggcttgcgctccattcctttatgcccgatggcaatgatactgagagcctgcaactgcaaaggcatgtcgagtacttcgtgcacatattcgttagaggacatgccggatgccgtaaaacgctcgcgaagctgtacccagcaactgcccaatcccatatcttccgcctgaagttgcaggtaaatggaagcgatagaggcatcttctatccagacgtcgcttgccagcgggtcggcggttacaaccacagccaatgcggcatccgctatgaattgcgaagcctgctctttacagaaagacagctttttcaatgtttccttatcatccaccacgataaactgccacgcattgctccgtttggaagtaggcgccatcagtgcggctttcatcagcgtaaccacctgttcttgcgtcaactcctcttctgtaaacttccgcatgctgcggcgggtctttatcaattcgctaaaactttccatagtgtatatcgtttagaaatgaatactttgtcgttaagtaatgcaaagatacaagattatttttttaaatttgcagcaatgcccttgaaactgactacataccatcggggaagccggatacccgaactgccgggaaccgatacattccactctacggagctgtttcacgtctatgaagcaactccgggatacacacctttgcttattgtggcgtcggaaaacggaatacccgtagccaagttgcttgccgccatacggaagagcgtacgactgtttccacccgccatcatcaagcggtgtgaggtatatggcaccggagaatatttcgatgaaacgctcaaccgtgaagctgtctttagcgatatgctgcaacgcctcacggacgaagccctgcgggaagccttccttatcgagttccgcaatctggacaattcgttgtccggttataaagtattccgcgagaaccgttactttgccgtcaactggctgcgcgtacgcaactcgttgcataatgtggagcaggtagaatcccgtttcagttcctcccgcatccgccaaatcaaaaaagggctgaacaacggagcagaagtaaaagaagcacataccccggaagaaatccatgcttttgccaagatgctgcattacaactactctgccaagatacggcggcatttcccaagcatagactttttccagctcctggaaaagcaaatgccccggaaaagccgtattttcattgtaacctataaagacaaagttattggcggaagcgtctgtatctattccaataacagtgcatacctatggttctccggcggcatgcgtaaaacatacgctttgcaatatcccggcattcttgccgtgtggcaggcattgcacgatgccaaagaacgcagctaccgccacctggagtttatggacgtaggcctgcctttccacaaacatggctaccgcgaattcgtgctccgcttcggcggaaaacaaatcagcacccgtcgctggttccgttttcggtgggaatggctgaacagggtgctgataaagatgtatgagtaaacgggctattgggctattttatagaccactgacgaatatcctcccaaccgtatggaagtattatccccttctttcacctgaacagttcccgatacaccgacagccttctcgatattatctgtcaatgacagtttaacagatgcgcttccaaagttgtgaagaataagcatcttttcattatcttttgtcatataccatgcagcaatgctcttgtacttttcgttcgattcgttatataccgcatgttttgtcattgtaccttgagccaaagccggataggtattacgcaaacgggtaaaagagagataggtattcagcaacgaatttgcattttccttctgttctgctacggattttatactcgaagccacggtggcatcaatcttgtccgtataggcagtagtgtaagtatctccccacagcatcggactgcgtacatattcatccgccttttctttcgttccgtagatacccaattcttccccataataaatatagggttcgcccggtgcagtgagcaatacggcagccgcaagtttacactttgcctctgattttcctagtttggatgctgtacggtcttcatcatggttggatagtttggtagcttctatgtaatcggcacggtatctcgcatatttctgttggaaagaaagtatgtctttcgcaaagtaacaaccagtggagttggcaatcgaccagtccagtttataccagaagtcaaactcaaacaatgcgggaagtccttgataataaggtgccacctcgtcactgcccgaaaggacttcacctacaatataaatatcatctgtatgccctttcgatttataatattcgttcatatcatcatagaacattttcagaaaacggggattctcatccgaagtggcactgtgataaatatgcttcaccgcatccaaacggaagccgtcaattcccctgtctatccatttttttgcagcagcggatattgctttatatgccggagagttgtcagcatcatcaatagcaccgtaattaaggtcggcaaaccagtctgtttggaaatgggaatggaaataccatgcttcgaccgatgcaaacaatatgtcctcaggatttgcattactcaaagtaaaaggcttgcccaactgcactttacttgctttagacggagctccatacttcgttccgttgtcccatgaagtattgcttgtacggattaaaaagccccaatccgtatcaagatcaaccgttaactcgtacttattattgcctctcgcatagaatttcttgcaaatgccctcaccataatataagtacttggcatcttgcgtggttacgtccggagtatccgcgttcggagtatcttcttttgtaactgttatggtgggacttgcagcattagaccagtcgagtacaaacttataatatcctttcatggcatcacctataccagccgaaaaccattcgcctgcattatatcccatagagctttcccgctttatcattggaattttaccggcagtaatatcggatttcgggtcttgtgagaagatgtaatagtcacggtaaacactttccttggacgatttcgcatctataaaccaaggatgatcctttccggtatggttcatcacataatccaaatagacttttatacccaattcatgggctttggcaatcaaccgttcaaaatcatccatagttccataccgggcattcactgttgtataatccttcacatcatatccgtgataagacattgccggatgaattggcgacagccatattgcattcacacccatttcattaagataatccagcttatctgtgagtcctctgaaatcgccccactcgtcattattactatcggcaaatgaatacaccaatgtctgataagtaatatcggcacgtttggttccgtcccacgtatcggatgagggttctaaagagacatatccttcaggagtttcatcctgccccggtgcaggctcagaaaaagctccggggtcatcactacaagccatcaaagagcttatcagcaaacccaatattaaatataaaacagattttacgttcttcattttatcagattttacatacaattaaaagaaatgtgtctgaacttgccttaaacaacgcagaccggtatggaatcccttaatacaaagagaagaaataacaccaaatccatgtaacttgtagcaagttcagacacactcgcctgatttaaaataaatattctttatatatcgcagatattattcagccgtctgaaatacaacttcacctgtaatatcattaaagaatacattatattttccattgggaacaacaacattcttaccatctgcagtagtcaatgacaaatagtttttatccgctattgttacgttatccgttgcagcaccccaagaaatgtcccacttatggtcagcacgcaactttaatacaccgtcttttcccggttcaaagccagctatataccagttatgcggagtaatctgttccaaatctttctcagaacccgctgtatcccaatcattatagtcaccaatcaaacttatatgagtataagatttcggagcctgatcagtcagttctgtccaagcatattcgtttgtagaaaagtcaacttccagtttataaaatttaccgacttccggacaagctatcgctccggcatttactgataccaacttaccggaaacagcattatcgccatcgctctcagcaccataacaattatcccaatttccaatatctgcacctaaccaaatttttagattaccggctgtttgtacaccattctcagttttagtaaaatcggtcgtatacgcatatttcttatctccttgtggataaagcatacattttgccgacttgtctgcccatgatgtaacgtcgcctaccagaaaatactccaatggggtattcagcttgactttcaaagtaaacggagaagctttcttcttggttatgatgctaccgtcttctgtttttaccgttacatcggctgccacttctacagcaacagtccgttcttcggggcttttaccataaatagccgctaccgcgtttgccaaatcggttgaagcaaccatcccggctgccgttgcgctcagagcggcggttttatccttaccttcagcagaaagagtaagcgcgtattcacttacctgcccatcttgcagactggtagtaaataactgaatattttccgccgtttccactacaaaatcaatggcgctgactgccggttctaccgtaaatgcgattttatcgaccggttctttggaatcattgctttgagggcttgcccaatccgtatagtcatcattgcaggaaacaagtcctgcaatgatagccaagccatatactaatttctttatcatagtatctttcttttaaagtgtgtaatttatttcttaggaataatactgaattcaccggttatatcattgaacatgataacccatgtacctgccgcaacaccgatgttcttgcctccggctgctgccttaccgcaaacagatacctcgccgtcttccgaaccatatccccaatttgtatcccaagaaccgggaatcttgaacttaatctgcttcacggcatcctcttccactgtcaacatataacaccatacatggttttcaccgctcttgttcaccggagtcatgttctggtcggcccaatcgcagaaatcaccggtgatacatatctgaccgtaaacagccggggttatttcctgattgacaatagtacaagtattcgctccggtattaatggtaacaagataatatccggccggattacatgtgatatttccgccatcggctccgccgttacgataaacagcctcattgggagcgcctgtaccacaaaatccataatcccaattgaaatccgcaggctgtatcttccactcctcagttgtaaaatagttgaggtaggtaatttcaccggcaccggtcaccttatcataattgtaatcgctttgcatgaacagcgggaagctactttcgcccggcttatcactccaagcaccgtcaccaaaattatttccgacaagataccacataataggagcggcatccgacaattccacataataaggagccacactgatttctaccacattcgatgtaatggcattcaatctattcataccttcaagcacaaatgcattgatacgaataaaagtcttttgttcggcaggaacagcgtctgctttccacttcgctactttagccagagccttgttaagttcagatgccgccaaatcagcaaaacaggttgtagaagtcttgtcgataactgcataatcggcaacaagagcattttcctcatccgcatccgcttcgtccgtagacacagtgaatgagtttgtcggagaaacctgtatttcatatgtcgcattaatcggagcattgcctgttgtatattccggttgtgaccatgtcaaccgaagagcttccgtattctccaaatcaaccgtttcgttcacgtaagccggagtgttcaagacgaactccgtgggttgtatcagcgtagggttcgaatcattatcatccgaacatgctgcaaatatgccggcagtaccgacaagcacagcaccaagcaataatttattcttcatattacttttctaaatttactgttttaactttactcttctgtctcattataaccatcaatctggataaggcttctgtttgcctgtatttccgatgtcgggagagggaaaagatttcttgtcttatcgaatgtcactccattgatattgccgcctttatacgaccagttataggtagtttgcgtaccaccgaactgattaaaacgtataaggtcggtacgacggagaccctcgaaatagaattcgcgcgaacgctcgtcaagaatatagttcaggttgtaagaatcgcttgtagccgtgtgagcacgcttacgcaagatatcgatataaccttttgcctttgttgaactctcgccattgagatgcatttctgcttccgcagcattgagataagcttcagccacacggaaaaggaagaaatccgtatccacatcgaacacatcgtgcgggcttccgccgttggaatagttgttattccatttcgtagttaccaagccttgatagaaactggagttatctcccaagtcaagcgtacgttcatcgccgtccgaaccttttccccagaaaagcgcacggtcatcgatttgcaaagcacggatttccttcgtcgacttgcctacaaaagattcaggattattagtaaacttctcaatcagttgaggacggcatcgcataccgcaccacgtattacccgtagtaccggcagttaggtcggttacggtttgcatcttatcgttccacatagcggcaataaagaaaagcgaacctccatagcctttcgtcacctttccatcctgaagaagcggaagtatggcttcacaactggcaccattcgatccgttatcacccataaagagcaaatcgtacggacgatagcctctctgcgtagcttctgtcggaatcctggtatcatcaaagattgcgtaatttgaattgataaccatttcagcatattccaacgctttatcccaatgaggattgttctgcccgtcattattaagataagtaccggcattaagatataaacggctcagcaaaatccaggctgccgctttgtcagcgcggccatagtttgcatcactgtccgtttccggttcggcaggcaacatatccgcttcggcattttccaattcctttttcacccaattaaagaggaattcacgtcccaattgcagaagttccgcacgggtatatgtggcactctcgtcaaatttctcattataggcatgggcttgtttaggcacttccgaggtaattgtctctataaaagaggggtctccaaagaaatcgagcattaagaaatagttgtatgcacggataaaacgcacctctgcaagcatcgtcttatcggcttgtgccgcttcaaggctcaaataatggttgcagtacgtaatattggacatcagacgataataaagaaatctgagagtcgcagtacccggcatacattggttataaccgatatcggtaataccaccgtcgctccaccagcagatagcctcatcggtagaaagttcattaaaattaaacacgttacgcaataacgtcgatttaccggcatcgtctatggtaaaatccgcattaccgtcattaccttccatgatgagtccggcataacatttgctatacagccccaacagattcggattaggctctacggtagggtctatattccctttctcaagatcatccatacaggaagtcatgcttgctgtcagaaaaagagcaatggcaggaaatattgcttttattttatttagtttcataattgtcctcagttattaaattagaaattaagattcaatccaagaaggaaagtacggctgcgcggatagaggctgctctcctttccggaagtctgttccgggtcaagccctttgtacttcgtaatggtaaagacatttgagcatgaagcatagatacgtcctgacacgcctttgtacttgccggctttaaaaagattatcgaaattatatccaagcgtaatattgtcacacttcaggaaacttgcattctgtacaaaataatcagtaagcgcataattgtaagaactccagccaaggcttacgatatctgccgtgctattctcgtaatatcctttggaattataaagcattgcagaatttgccttgcccgattcgatgccattgtatacataattaccgaagctggctctgaagttggttccgaggtcccagttcttataagctactttaaaattaaatccgcctgtccaaggcgctataatgtttttataataatagcggtcgttttcgtctatgctgccgtcagcattccggtctacataacatcccatgataggacgtccgctttcgtcatacacctgctgatacacccagaaggagttggcgggaagtcccactttatgataggtgatttgctggtcggtacccactttcatacctgcttcaataacgtcacgtccgccataaagaccagttatctcattcttattgtatgctatgttcattccaagttccacaaaccagtcttttgtttgaacaggtttgcccgacagagctatttcaacaccggtattcttcaaagaaccggcattaagcataagggcattatcaaagttctgtcctgccggaattgtaggtgtggaaagcaagtccgtggtttcgcggtaataagcatcaaggttcaaagtcagtctctggtcaaacattccataatccaaccctaagttccatgtggtcgtagtttcccaagtaaggtcgtcattataaggcaaaggctgataaagcgtacccggattgttaggacctaccggataacgatggttctcactggtgcttaccttgtatatggctgtgtagtattccttaccggtatcctgctgaccggtcttaccccagccaagacgaagtttcaagtcactgacagcatctacatctttcaggaaagcttcatccttcacacgccaagcaaaggctgccgaagggaagaaaccccagcgttgtccgtctgcaaaacggctcgaaccgtcataacgggctgtaaaggtgaaaagataacggtcaagaagcgaataattgacacgtccataccagctgacaagataaatctggcctctccaattctttgtagaagagctgtttattgttccggctttcggagtaccatcgtcataataactctcattggtagaaggataatagttttcgaaccattctccaccccaatatttcatgtggttatattcgtaacccaccatcacatccagatgatgtgccttgttgaaatctttgttgtactgggcgtatgccgtagcaatcaggttgtatttcttttccttattctcgcctacacctccataatagaagccataagtcgaatacggattgttgttagtatattctccaccatcggcatattcacccgaaagattcatatgcaaacgcaagtcttcaaatccatgtatcttataatcggcttcaaaattaccgagaagtacggtagcgctcttatcgaatgtataatgttcaatcagttccaccggatttttaggagcatcatcattgcgtgcaaacgggaaagtggggtcgtattcggaagtattctttgtccactgccaataaccgccccaattcttgaactgttcgtcctcactcattatcggacgagtcgggtccatagagatagctgcaccgatagcatccgtaccacccggatttgtcttggagtaagaatacttggcattgatgttaaaattaagatgatcattcagcaatgagggattcagagtaaaccctgctgtaaaacggttataatcggaacctttcagaataccttcctgattggtatatcctacgctgacacgataaggcatggaccaactttcattgcccactccaccggtaacgctgacattatggtcgtgactgataccggcacggtatatttcatcctgccaatccgtattatatgtgccggcagaaaagtccggtgtaccatcttcattgtatttctgccatccgagtcctgcataagctgccgagccttcgccatacgtattcttgataaattcaacatattcgggagcgttcattacatcgagcttgtcggcaatcgtacttaccgacaaagttccgttatatgaaaccttcggtgcctggttcttacgtccttttttagttgtaatgataattactccattagaaccacggctaccgtaaattgccgtagcagaagcatctttcagcaccgtaaaagtttcaatatcattaggattgacaagtgaaagcggattgttcacacctttggtattgttattatccatcggcatgccgtctatcactataagcggattgttgctggcattcaaagaagcgccaccacgaatacggatttgagcaccttcaccgggagctcccgaagtggtgtttacatttacaccggcaatcttaccttgaatcatatcctgagcgcttacgaccagacctttatttttctcatccggcttgatcgctgtcaccgaaccggtaaggtcatttttcttagccacaccgtaaccgatgacaaccacttcattcaataattccgaatcgtctttcaaagtcacaatcacagatgaagttgcttctatttcctgtgttttgtatcctataaaagatacctgaagaattgctcctttgggtacagacaatgtaaaatttccgtccacatcggtaatggtgccattagacggattacctttttcaatgacattagcgccaatcacaccacccaaagcatctttcacatgccctttcaccgtgatgttctgtgcataaacgccaactgacaagaataaccctaataacaggggaagaatcgttcgacagattctaagattaacttgcttcatgcatttaaaaattaaagttaacaatattaattatctacagtatattcaaaagacgtttcagtatattaacctaaatacggaacgtgctccaaatactttattatgatacaacaaatgtatgctatattgtcgagtaagagacaaagataccgtaaaaagttcaataagaagaatgcaaacgattgcactatatccggcatcatgcgctatcatctcataaacgcatgggcacaccaatggaaacgcgtaataaataacgggaaatcagcagggtaatatctgcaaaaacacacgctaaatagtagtttagctactgcattttccccggaacagcaggtcttttttttcgtttcgcagttgcgggctctacggttgccagccgcgggctgtcgggcccgcaattggcaaccgtagagcccgcaaccggaaaacaaggaaaaggaagtgataaaaggacattatacatgcgataaaacaaagaaaagaaagagggaatgaggcatttatccctaacaaataccttactgtcacagggcatattccggaaattacgggtgcatttatctttaaacaatgcaccgaatcgcatgataaaggtcttttggagtagtaaatcgtcagaaaagtctctattatcgactgtgtgtcaattaagataacacactgattataagacatataatatttattcgcgtgacgaccacgaatcagtcatcactctcaccacgcttgtcgtcactccctgtatccctttgctggaaagggatacagagtgattggtgacgagtgatgacaaattatgcaaaactctgaaacagaaataatgcaaatgctacctatcggcagacaacaagattgtcccagtctgcaagccttttgctttggcttcaaaaacaatttcaccggactgttccgtgctctgcacgatagccgtcaactgtccgctgaaagccggcatcttgggtaaatggaaaaggtcgaggctggtggcatcgccattggctgccgcacggtaacggccggctccttttacagagaaagagacaagacgattgtccgactggcagagattgccgtctttatcgacaacgcggacggtgatgtaggcaaggtctttaccgtcggcagcaagccgggtgcggtcggcaaccagttccagatgatgaggtttgccggcggtacggacgattttctcttctgccggtttgccggaagcatcataagccacgactttcagttcgcccggttcataaggaacatccatccacatcaggcggtagcggcgttgcaaggcaagcgagtccttgccttgtaaggctttgctctccgatgccgtcagtttgcgttgcttaccgtagctcttgccattgacgaaaagttccgcagcgggatagctggtataaacaaagacgggagtattctctccttccctgcccggccatgtccagtgcggaaggacgtgcagggtatttgcggtcttgttccagatgctgcggtacagataatagcggtctttgggcaggcttgccaagtcaatgatgccgaatacggaactgtggctgggccaggcatccgtgtcgtacggagagggttcgcccagatagtcgaaacccgtccagacaaactgcccgatagtccagtcgtaatcatcggccagggcaaagtcctcatcgggcacattcgaccaagagcaatactccacatcataccccgaagactggtggtcggcatacgttgcccctgcccgtttctctaccgggaatttatagactccgcgggaacttacggtagaggcggtttccgaaccaagaatgatattctgcggaagtgcgttgtaagactccacatagcggtgggcgcggtagttgagaccgggaacgtctatcatagcggcgaaaccgttttccaggacgcaagacacctggtccataccgcaggtaacaggacgtgtggggtcttcgcggtggcatatatcctgcaggaaagaagcgactttatagccctcggcactgcactgcgtaggcacttcgttgccaatgctccacatgaccacactcggattattacggtaatgacgcaacatattcaccatgtcccgctccgcccattcgtcgaagtaacggtgatagccgttatcgcatttggcaatatcccattcatcgaaaggctctatcatcatcataaagcccatttcgtcgcaaagctccaccagttccggagccggcatgttgtgcgatgtacggatggcatcgcagcccatatccttcagcagcgtgagctggcggcggagagcagccacattgacggcagcccccaagggccccaggtcgtgatggttgcagacgccctgaaacttacggtgcttgccgttcaggaaaaaacctttgtccgccacaatctctatgctacggatgccgaaacgggtggtatattcgtccaccagcctgccgtcggcatatatcttggaagacgccttgtagagccggggtgtctccggcgaccataaggcgggagtatctaccaggaagttctgctcgaaaggctgcccgtggtttattttgcgggtgttgtctttggcggcaaccaccttaccgtccggcgatataatctcggtcacaatccggatatgcttgtttccggcattggcaatctccgtacgcaaacgcacggaagcatacttgtccgacacgtgcggggtggtaagctgagtgccccacaccggaacgcataccggttcggtcgtcagcaggcggacattccggtacaaccccgcaccgggataccagcgcgaagactgcggtttgttctccaaccgcacggcaagcgtattgggttttccgtccttatatatataaggtgtgacatcgcaatggaaagagttatagccgaaaggccagaagcaggcttcctgcccgttgatatagacacgggcttcgctcatggctccgtcaaaaaccagtgtagcctgtttgcgggcgggaacggtaaaggtggtacgataccagcctacgcctacataaggcaatccgcccgtgcgtccggtctttaccgaagcctgtttttcgaaattctgcgtgacggctactttctgcaaatcgttgtcacggtcgaacggtccgtaaatggcccaatcgtgaggcacggttaccgcctgccattgctcatcgtcatatcccgggtgagcagctccggatatatctccccggaagaacttccagcccttttccaatagcacttcggtacgctgcgccataacggccgtaaagaggaagaagcaacagatgcccgttatcagtctcttattcataattatactgttttacaggttatttaaacgcatccataatcaccgtagggcggccgtcggcagtaaacgctcccaaccgatactggctcggcttgcactccggctcccaatagaacacacccttgcagcgtcctccggtattctcccggctttccttgacgatgcgttccaactgccgtttgccttcggcaaggacagacgcacttgccagattgcccttgtcatcaccgcattccatgccggtttccactatcatcacatcacaatcatacttggcgcccaacgccttgatattctccatgcagtcggtgataatgtcatcggcggtataatccggcttctccatccgtgtccagtaaggataaagcgacatgcctatcatatcccacttcccgttgtgtttcttcagctcatcgaaaaaccagttgaacagttctttatcccaaccgttgtccagatgaacaatcacaatcgcatcgctgaagactgacttcaccgcattgtagccctcagtgatgaaatcggccaaattactccagtttgcgggatacacgactttatccgacgccgttgccggagcgtttttcaagtcacgctctttcacatcataggatgcaccgctcagcgccacattcttatcccacaacatacccggacgtatttcgttgcccacttgcacccatttgggagaaactcccgccgccttcaaggcctgaagcactgctaccgtatggtcgccgatggctttcttcagttccggcagcgttttgtccttccatgcggcaggcttgttttgctgggcggggtctgcccaccagtcactataatggaaatctatcattacgtccattcccaaatccttcgccctcttggctttggctacgacatcgggtgtattgcaccagttgccgtgctctgccgggtctacccacacacgcagacgaaccgcatccagtccgcactccttcatcagggcggtgcattcaagctgcttgccgtcggcattatagaagcgatgtccggccgcttccatttccgtaacccaactgatgtcggcgcctttggcaaaagaatcatctccggtgccgggagtctgctccggtgtcggagacgttccttccctatcgttgtcggccgtgttcttgcatgcgataaaaaggcatgcgatactcaaaaagaaagtaataaatttaatgtgtttcatggttctaagtattatagtaatataacattcattgaagcaaggcatcccgtctgccccattaaggcaattcatacgatgccgtcctaccgcaaaattccccctgcggcataggtacttctatcgtttcaccgttataagtaagcgttattttcttcaaagccgcattcatgcaggcatccgtcactgtaaagacggactttcctgccaccatctttatcattacggtacaaggttcagaagctgcaagcgacacaccgccggcctgcaggccattgttgcccggatagaacaccgcctgcaacagttttttgtctgccgactgcactgcttgtaccaaagagtcattcctcagtacacggaaaggcaaccgggcggacggagtgccctttcccgtatacacggtataaccgtacgtatcatccacgggcgcttgtccgtggtcaatccacaaacggagaattttcacgctatccggcagattcttcttaccggcatttgttttgttgtgcagcacccagttcgcaggacgcgtttcgcaggctacgaacgctttccggctgtattcaggaagaacgcggtaagcaaattgcccctcctgcaccagccagggtgtgttcttgcctgagattttccaagtatgcacaccggctgaaagagccgttttcttgcctttctccaataaacagacatcattcagcaaggccgtctggtcgatagtggtacggatgtgtcccggctgtccggactgcctgttcgttacacccgctcccaaggcaaccatatagtctccctgaataaaataagatttataagcctttacaccataaagcacctcgttacagccggcactgctgccccggtcgttcacaccctctttctccgaagcattcattttctcgaaaatatatcccgccactgcatcgccgctaccgtccgtggctgctgccgcataattatgcttactgcaatagccgcgccagttaactaccggttccaggcgctccatgccttcgcgtgcggttactccgggagatgccgttacgtcccagccacccatgatggagcgatattcgttgccgctgcgctgaaacaaagtcataccgtccgtagggtagaaattataggcatcggcaaagttgggagcactctccaagccgtcacaacgcatagaagccatattcaccattatgtggcagtcgggggttttctttatcaaatcatcgttattaaagaaccagcgggttccggaatacatacccggagcgtaccccgccatccggatatgcttttctttcacttctttccataactgccgtaactccgcctgctcggtttccgtaaaagcatccatccagtccgtcagcactttattcagcatctttgcgtaaggaatctctttttcggcagcggtatagacatacgagccacggtccagacaaggcaaggtaaatcctttatagtagtaccagtttccaccgcgtagaaagttcaggatagcttgggcattcttcctgctcaggcgctccgcccacggtgtccctttcagcatacccagcatattcaaggcattgaaggttccgtctatgggatatccccaaatcaggcattgcttaccatgtccccaccctgcaccgtcggcagtaaaaccttcggtccagaaagaatcgtgcagagtaagttgggaagtcacgctgatacctctccggcaaacttctgccaatacatccaccataggcaccgaactgtacattgcagctacgggcaatagcgaacggtatgccaacgcgttgccgcccacccaccatacatgattgcggaaacgttctatcgaaacaacgttcttgtcggtttcatcatgacgcagcggctgcgtataggcttgcagccccaataccttcagcatatcgcaagcggcctccagcaaaggagttgcaccgccgcgttcggcaagttccattttatccagccaggcgaaatagatgtttaccgcagccgtaggaatggcaaagcaggaagcgtgaaaacgggaaacggcgttcgagcgtccggcttccagcatgccgtagtgcaccaccgctttcagcactttgtcgctcaacgactcgtctgccgtcagcgtaccgcggcggtatgcgtcggcaatgcagcacaagcggtcaagagcgtttccgatgaaaatacccacccggtcatcggctgttgtatggaagctcttccgataggcattgctacgttcgaactcagcttccaaagcgtccatatccgagaatgtcccctccggcgtaagcaactccagacacctggcgggcggcacggacatattcaccttagacagcctgtaaggatgctcatgaaaatagacacgcaatttcttcattgcctccaattttacactatcggtgcagaggcgcgcctcgcggtaatagcggtgatagttatcgaaagcaaacttaacttcctgctcttgggcagagacagccaatgccggcaagcataggcaacaaaataaaacaagtctctttatcatagtcagccaatacattataatattaattaaaggataccacattttccagaggataaagttacggagatttatcgtatagcaaatgatttttaccgggaatttaccgtgcagcgggcaaatacatggttgcaaacagtacatgcaatcgtttgcacaaacttataacctgatatgtatcaacagaaaacttttattagacgcattccgctatttttgcagcaggataaataagaagcccggctacggtcttcgtatatcttcctatttttattacctttggctgaaaattgaaatcatactgatgaacaaaccgcagataaccattaaagatattgcccgggcattgaatgtctcgccgtccaccgtgtcgagagcgctcaaggataatccggacatcagccgggaaacccgtgacctcatccatgcctacgcccgcgaacataactacaaacccaatgtgcttgccgtgaacctccgttcgagccgcagcaatacgattggcgtgattgtgccccaactggtgcatcatttcttctcgtgcgtgctgagcggcatcgagacagcggcggccaaagccggctacaacataatcgtggctcaaagcaacgagtcttacgaacaggaagtcaaaatcgtccactctttccttgccgcccgcgtttgcggcgtcatagcctcccttgccaaaaacacggagcaatacgaccactatcaggagctgctgaacaacgacataccgattgtattttacgaccgcatctgtacggagctgaaaacggaacgggtggttgtggacgactatgccggctcgtttgccgccgtagagtacatgattcagaccggatgcaaacgtatcttcttctacggcgcatctccgcatctggagattaccaaaaaccggcggaacggctatctggatgccatgaagaaatacaaagtgccggtggacgacagcatgataaagctgtgcgacaaccgtgaacgcgccattgccataacgcccgacctgctggagagtgacaatcgtcccgatggtttctttgcaattaatgacgaaacggcggcaggtatattgtatgcctgcaagctggtgggactgaaagtgccggacgaagtttccatctgcggcttcaccgacggagccatcgcccaaagcaccgacccgaaactgaccactgtggagcagcacggagaagaagtgggcaaaagcgcattcagcatccttacagacaagctgaacgggcacgagggaaaaagcaccaacaagattgtgcggacaaacctggtggtaaggggaacgaccaaataaaaacacaaccgaattcatctataaactaatatcataaaaaacaagagagcaatgaaagtaaaacccgatttaagtttctggaaactatggaatatcagcttcggtttcttcggcgtacagattgcgtatgccttgcaaagcgcgaacatcagccgtatattctctactttaggagccgacccgcacagtttgagctatttctggatattaccgccgctggcaggtatcatcgtgcagcccatcgtaggagctgccagcgacaggacatggacacggttcggacgtcgcattccctatctgttcatcggctcgctggttgcggtactcgtcatgtgcctgctgcccaatgccggcagtttcggtatggcggtgagcacggccatgattttcggtctggtatcgctgatgtttctggatacttccattaatatggcaatgcagccgttcaagatgatggtaggcgacatggtgaacgagaaacagaaaggacttgcctattccatccagagtttcttatgcaatgccggcagcctggtgggctatctgttcccgttcatatttgcgtgggtgggtatcagcaatacggcaccccaaggggttattcccgattccgtaatctactcgttctatatcggggccgccattctgatattctgcgttatttatacaacggtcaaagtcaaggaaatgccgcccgcagagtatgcccaatatcacggtatcacggaagagcaggaacatgagaaaatcaatatgctgaagctgctggtaaaagcgccgaaagccttttggacggtagggctggtgcagttcttctgctggttcgcctttatgttcatgtggacatacaccaacggaagcatcgccgcaaatgtatttgacgctcccaccgttgaaaatacggtaaacggaatcacaaaaatagttctcgacaccaagagcctgcaatatcaggaagctgccaactgggtaggcgtactgtttgccgtacaggctatcggttccgtactttgggcaatctgcattcccatgttcaaagaccgccgcttcatttacgcgctgagcctcgtgctgggcggtatcggatttatatccacctatttcgtacacagcccgtatgtgctgttcgtatctttcctgctgataggctgcgcatgggccgccatgctggcgttgcctttcaccatcctgaccaacgccttgtccggcggacacatgggtacgtatctcggactgtttaacggaaccatctgtattccgcaaatcgtagcagcggcgttaggcggaagtattctggcactgtttacgccggaagggatgcttccccctgaaataaacatgctggtaacggcgggtgtgatgcttataatcggagctgcctgcgtatatttgataaaagagaccaaaggagaaagggcgtaaacagcccctatcctcaccgatgaatatatgcttcctcaccggtaagagggtgtaaaatacacttgatgatttcttttaggcacggattacgcggattgacacggatttattttatctcttttccgtgaaatccgcgtaatccgtgcctaaaaataaataaatagcaaacgaattttagttttggcacattcttcttttttccgcatcctatttgtttatccgtttatttgtctatctttacaccgataacacagaaaaagagcgccatgaagaaataccttaaaaccgatgaatggaatattatagaagatagttttcaagccgaccgcatgcggtggtcggaaagcatattcagtcttggaaacggccgtttcggacaacggggacattttgaagaaccatacagcagcgacagctatcgcggcgcattcgtggcaggtatcacctttctggacaaaacgcgtgtaggctggtggaagaacggttttccgcaattctacacacgcatccccaatgctccggactggagcagtatcagcctgcgcctcatcgacgaggaactagacctggcacaatgggatgtggacagtttcaacagacgcctcgacatgaaagcgggtatttcttatcgggacgcggaagtaacctcttcgcggggaaacaaactccgcctgcacgtggaacatatcgccaatatggctcaccccaatctctgccttataaagtacagcgttacgtccgtcaactatacaggcaaggtttcacttgtgcctatccttgacggagacaccgcgaacccggtcaggcatccggatgaaaagatatggaatatcctgcgctccggcaccaccagcgactgcgcctatctgtggacacagaccaggcgggaggatgcgcaaatatgctatgccatgacctaccggttcttcaagaacaataaagagacttttgccaacccgatacggatagaaaaagaaaaacaggccggattcagcgtaggcactgaagtgaagccgggagataccgtgacgctcgtcaaatacattgccatagcatcgtccctttattatgaacggcaggatttgatagaagcctccgtagcagaagcccgcaacgcccaaggtacaggttgggatgctctggaacaggagcaccggaatgcctggcaggagatatgggacgaaaccgatgtcagtatcgaaggcgacccggaagcccagcaaggcatacgctacaacatcttccagctctaccagacataccggggagacgacccccgcctgaatatcggccccaaaggtttcaccggcgagaagtacggcggaaatacttactggaataccgaattgtgctgcgtacctttcttcctgctttccaccccgaagaagattgccgaaaacctgctgatataccgctataagcaactgcccaaagccattgagaatgcccgtaagttgggattcgaccatggagccgccctcttcccgcaggtcaccagcaacggagaagagtgccacagcgaatgggagattacttttgaagaggttcaccggaacaatatgattgtctatgccattctgcaacatgccacgcttacgggtacgctggactacatcgcccattacggattggaagtaatgatagccgtcagccgcttctggagccaacgggtgtctttctcgcaacccaagcagaaatacgtcattctgggagttaccggacccgatgaatacgaaaacaacgtaaacaataactggtataccaactactcctgcatgcgttgcctcgaaaccactctcagtttccttgaaatcattgcccggcaatatcccgatgaatatgcccgcatatgcagcatcaccaacctgaattatacggaagagagtgaacgctggcgggacattatcgaacggatgtacctgccggaagatccggaacgcggtatcttcatccaaaacgacggctatatggacaaggttctgcaaagcaccgacgccattcccgccggcgaacgccccatcaaccagtattggtcgtgggaccgtatcctgcgttcgtgctacatcaagcagagtgatatcctgctcggcctgtacctctattatttcaacttcgaccgggagaccatccgccgcaacttcgaattttacgaaccgatgaccgtgcacgagtcttccctctccccgcacatccactctattcttgccgcacgcatcgggaaagtggaaaaggcataccaactattcttacacgctacccgcctcgacctggacgactacaacaatgaaggagaccaggggctgcatataaccagtatgccgggcagttggctggctgttgtacgcggatttgcaggattgcagatacagggcggcacgcttaagattgaaccggtcataccggcgaaatggagcggctattcgttcaaagtgaattacttgggcaatacgctgcatatacagataggcaaagaaataaaaatcagcctgaccgcaggaaaacaattgaacatacaggtatatcaaaacgtttatgaattaaaacaagggttggatttgactgtcaaccgcaaagacttgtcttaatcaaaaacaaatgaagaaaatgtatctgttcgccctgacggtgacacttatcgtcacgtcctgcgggcaaaagaaaggggaagatattcccctcgtgcgacctgtgaaaactgccaccgtaagttcacagtcggtaatactcaaagacttctccggcatggtggaagcggtggaatatgtgaaactggcatttcgtgtcagcggacaaatcatcgaccttccggtagtggaaggacaaagggtcaggaaagggcaactgattgccgccatcgacccgcgggatatttccctgcaatatgccgccgacaaggctgcctatgaaaccgctgccgcccaggtggagcgcaacaaacggctgctgggccgccaagccatctccctgcaggagtatgaaataagcgtagccaattaccagaaagccaaatcggcctacgagctgtccaccaacaatatgcgcgatacaaaactgctcgcgcccttcgacggctctatcgaaaagcgcctggtagagaactatcagcgcgtcaattcgggagaagggattgtgcggctggtaaatacgcagaaactgcgcataaaatttactgtacccgatgattacctgtacctgcttcgtgccaaggacgccacattcaaggtggagttcgatacgtacaaaggcaatatattcaatgccagactggaagagtatcttgacatatcgaccgacggcacgggtattccggttaccatcaccatcgacgaccccgccttcgaccgtgccgtatacgatgtgaaacccggatttacctgcaacatccgcctcgcttcggacatcgctccctttatagaagaaaaactgatgaatgtaccgctgagcgccgtattcggtgacagcgaaaacaagaatacctacgtatgggtggtgaaagacaacagggtaagccgccgcgaagtaaccgtgtattcgccgaccggtgaagccaatcttcttatctccaaaggactgaaaccggatgaaaccgttgtcattgccggagtgtaccaactggtagagggacagagggtaaaagaggtggaataaccgctttccctctatcacttcataactttatcatcctatcaccttttatatatgaacttagccaaatattcattagataatacaaagattatctatttcttccttgccgtgctgctcatcggcggcatattctcattcggccgtttggggaagaaagaagatgcaccctttgtcatcaagacagcggtcatcatgacacgctatcccggagccgagcctgccgaagtggaacggctcattaccgaacccatctcccgcgaaatacagagcatgagcggagtgtacaagattaaatcggaatccatgtacggactttccaaaattacgttcgagctacagccgtcgctttccgcagcatctatcccgcagaagtgggacgaactgcgccggaaggttctcaacatacagccccaacttccggcaggagcttccgtaccgacggtatcggacgacttcggcgatgtattcggcatttattacggactggtcggcgacgacggcttctcttacgaagaaatgcgcaactgggcggagcgtatcaagacgcaggttatcactgccgaaggggttatgaaagtagccctgttcggcacacagacggaagtaatcaatatctttatctccgtaaacaaactggcggggatgggcatcgaccccaaacaactggcaggcttgctgcaatcgcagaaccagattatcaatacgggtgaaatcggtgcaggcgaacagcagttgcgcattgtggccaacggtacttataccaccgtcaacgacatccgcaaccagacaatcaccacccccggcggacaagtcaaactgggcgatatagccgtcgttgaaaagggatacatggacccgcccggcaccatcatgcacgtaaacggaaaacgggccatcggcatcggcgtctccaccgacccgcagaaggatgtggtaaaaaccggtgagctggtagacaagaagctcgccgaactcttgcctctcatccccgtagggttggaactggaaagcctttaccccgaaaacgtcattgccaaagaagcgaacaacggatttattatcaacctgatagaatccattctgattgtaatcgtcatcatcatgctggtaatggggatgcgcgccggcgtactcatcggctcttcactgatattttccattggcggcacactgctcatcatgtcgttcctgggagtgggactgaaccgtacctcgctggcaggctttatcatcgccatgggaatgctggtggataacgccattgtggtaaccgacaatgcacagattgccatagcccgcggcgtgaacagacggaaagcgctgatagacggcgccaccggtccgcaatggggattgctgggagcaaccttcatagccgtctgctcattcctgccgctttatcttgcaccgtcttccgttgccgaaattgtaaagccgctatttatcgtactggctatatcactggggctgagctgggtacttgcattgacgcaaaccaccaccttcggcaatttcatactgaaagcccaaaccggcaacagcgacaaagacccttacgacaagcctttctaccataaattcgcatccatcctcagcctgctgatacgcaagaaaacgctcacattgggaagcatggtcgtattgttcatcctctccctcgtcatcatgggactgatgcctcaaaacttcttcccttcactggacaaaccttatttccgcgccgatgtattctatcccgacggatacggcatccgcgatgtagagaaggaaatgaagaaagtggaagcccacctgctggcacagccggaagtgaaacgggtttccgtcaccttcggcagcaccccgctgcgctactatctggcatccacttccgtaggtccaaaacccaacttcgccaacctgctggtagaagtgacagacagcaaatacaccaaagaatatgaagagaagctggacagctatatgaaggagaactatcccaatgccatcacccgaaccacgctcttcaaactctcgcctgccgtagacgccgccatcgagataggctttatcggcaatagcacagatacgctggtggcgctgaccaaccgggttttagagataatgcaccgcgacaaagaccttatcaatgtgcgcaactcctggggtaacaagattcctatctggaaacccgtatacagccaggagcgtgcgcagccgttaggcgtatcccgccaaagcatggcgcagagcatacaaatagggacaaacggaatgacgctgggcgaataccgccagggcgaccaagtgcttcctatcctactgaaggacaacacaatcgacgcgttccgcattaacgacctgcgcacgctgcccgtattcggtactatgcgcgaaaccaccacgctggagcaagtggtcagtgagttcgactaccagtacaagttctccaacgtgaaggactacaaccgccagatggttatgatggcgcaagccgacccccgccggggcgtaaatgccattgccgcctttaaccgtgtgtgggagcaggtgcagaaagaaatcgatgttcccgaaggatatgccatgaaatacttcggcgaacaggaaagccaggccgaatccaatgccgcactggcagccaacatgccgctgacgtttttcctgatgttcgtcaccctgctgttcctgttcaaaacctaccgcaaacccatcgtcatcctgctgatgcttccgcttatctttatcggcatcgtactgggactgttgctgttgggcaagacattcgactttttcgccatcctgggcctgttgggattgattggaatgaacatcaagaacgccattgtcctcgtagaccagattgatacggaaacggccgccggaaaggcaccgcgtgaagcggttatcagcgcaacgaccacccgcattgttcccgtagccatggcatcgggcacaactatcctgggtatgctgccgttactgttcgacgccatgttcggtggtatggcggccactatcatgggcggcctgctggtagcttcgatactcaccctgtttgtattgcccgtggcttactgtgcgatacaccggataaaaggatagaaagatttgcgactcggctatttacgatttaccatttaatgatttgactatttacgatttgaatgatgagaaagattatatttatattgtcagtaatcagcttcggtataagtgccgcggcacaagaaagctatctcagccgcgaggcttatcgggacaaagtggaagcatacagccaactgctgaaacagcaacgcctgaaagctacggcaagcaccgaagcccgcaagatagcacagactggcttcctgcccaaaatagacattactgccgaaggaactgccaatctgagccatctggatgcctggaacagtccggcaggacagtaccgtccttacacctatcaggcattggcaacactgggacagcctctttacacaggaggttcgctcatggcccggaaaaagattgccaaagccgatgaagagctggacaaacttgccacagagctgaccctcgaccagatacactatcagagcgatgcggtttactggaatgcctcggccgcattggcaacactcaaagccgccgcccgttttgaagggattgtcagccaacagtacaacatcattcaagacaggtttaatgacggagctatcagccgtacggatttactgatgatttccacccgtaaaaaagaggccgaattgcagtatatcaaagcccgccagaactatacccttgccttgcagcaactcaatatcctgatgggagtgaaaccggatgccgcagtagacagtctttgtgaaatcggcatgcactgtccgcccgtcgatttactgagtcttgacgaagtattgtcccgccgtgcggactatgccggaacccatgtcagtatcgccaggagcgaagcgcaacgcaaggcagccctcagccagtataatccccaactcagtatgttcctggcaaccggttgggacaccggtatcgcctatatgggacaagacgtgccccatacgcccattgcgggaatcaacctcaacatccccattttccgatggggtgcacgcttcaagaccaaccgtcagcaaaaggcatatataggtattcaaaaactacagcaaagctatgtggcagatactattttagaagagctgtccgccgctaccaccaaactgacggaaacggaacagcaggtaaagacagcctgggagaatatggcgcttgccgaagagaatcttgacctggttacgttctcctacaatgaaggtaaggcaagcatggtcgatgtgctatccgcacagctttcgtggacacaggcccagaccaaccttatcaacgcgcaccttgccgcaaagatggcagtggctgagtacaggaaagctatcagtgaataaaggcggaaataaaaaggagatgcgccaaaacactcgttatttgtgttttgacgcattccctttttatatctcaactttcttatccgaggaacgaaatcaatacgcccgccgccaccgcagaaccgatgacgccggaaatattactggacatacagtaattcagtacgtggttcttagggtcgtacttggtagcgatttcattgcatacgcggcttgccataggcacggcgctcaatcccgtcgcaccaatcagcggattaatcttcttcttggagaacagattgaacagtttcacaaagaagataccacccgaaatggacaaggcaaatgcaaggaagccgccgacaacgatgccgatagtggtccagttgaggaatgcctcgctcgtcatggtagcgcccacactcagtccgaggaagatggttgccgcattcataatgctgttggctgccgcatcgaacagacggctggtatcggaaccgatttccttaatcaggttaccgaacatcagcataccaatcaaaggcactgccgtcggcacgaagagagctacaatggtagtaacggcaattgggaaaataatcttcagtacacgcagattctttatctcggtttttgacggatagagcttttcctgctccttcatgttaatcatcagttccttcttgctgcagagcagtttcacaaccaatggaatgataaccggaaccaatgccatgtacgaataagccgcaatggcgatagggcccagcagatgcggagcgagcttaatggtggtgaagatagccgtaggaccgtccgcaccgccgataatacccaatgcaccggcttcctgcggcgtgaatcccatcattacggcacacaacagtacggtaaagataccgagctgcgcagccgcaccgaatatggaaagacgcagattgcggagcatcggtccgaagtccgtcagcgcacccacccccataaagatgacaggcggcagaaatccggtctttatcagcatatagtagatgaagttcatcagtccgaggtcgtgtgcaatctcgtgcaacggcatttcccagatgttcttcaacactccgttcaccattaccatgccgttttcatctgcctggataacccccatgtcgccaccggggaaattggcaatgagcacaccgaaagcaatgggaaccagcaacagcggttcgtaatgcttcctgatgcccagatacagcaaaataaaggcaatggcatacattataaggaacgacggatcggcaatgatattgctgaacgccgtcatatcatagagtttcgcaaatatatcttccatcatccaatcttcattaatacatcatcttcagaaacagaatcacccggattgacgcagatagcggtcaccgttccgctgaagtcggcacggatggcattataggttttcatggcctcgatgtagcaaagcaggtcgccctccttcactttatctcctaccttgaggggagtttcctgtgcattcttggtcaggaagaacttgccttcgagcggagcagccacttcctgcccttcaccggcgggagcggtaatcttgtcggtggcggaagccggcaggtcgatgtcgccgtaagccaccgtcacgcgataagcctgtccgtccacctgcacggtgagcgtcttgggtttggcatcgtccagaggggatttgtcgcgttcggcacggcgtttctctacatcggcaaggaaatcctctttcgccttgccactcttgtaagcctcgtactgtgccgggtgcatggcgtattcaaagagttcttcatcatcttcgccaagttcccacttgttttccttcatcagcttgcgatacttgtcgagtgcatcgggatagttgtcctgcggattgccgttgaagaacttacgtccttcgcgttccgccttttcaacgagttcgggagcgagttcgcccggcagcttgcctgccttgcctaacagcatgtcccaaatatcgtcggctatcataccccaacgctcttttcctttctccatggccatgacgttcatcatggaaaggttcttgacgtactggctgaacggagtcaccaacggtggataacccacgcgcggccatacgtatgccacttcgttgaagagtttgataagcagttcgtcctgcttcataaacggcaggttgcgtttggccttgtacttgttgatagattccagattggattccaggtccgccatcaggcttcccatcatgccgcccggaagtcccggaccaatcagcaacgagttcatcaggcggttcttcgggctgatgtacagaccgaggaaatcatccataaactcctggataagtgcacgtactttcatgtacgcttccatattgatttcgggtaccttgaaaccggcatccttcagcatagcctgcacgctgagcaggtcggcatgtcccgtaccccatgaaagcggctccatacccacgtcgatatagtcgcagccggcctcacaaaccgcaaggatgcttgccatgttgaaaccgggtcccgcatggctgtgatactggatgggaatgtccggatgagcagccttgatgtttgccacaatcttgcccaaagataccggacggccgatacctgccatatccttgatacagatttcgtctgcacccagcttgataagcttcaatgccatatccgtataatattccacagtatggataggcgaatgggtgatacagagcgaacactgcgaaatcattcccgcctcgtgcgcataagtgatggaaggagcgatgttacgtatatcgttcagtccgcagaaagtacgtgtgatgtccgtaccctgcgccttcttcactttataaaacagcttgcgcacatcggcaggcacggggctcatgcgcaggccgttcagtgcacggtccaacatatgtgtctgtataccggcttcgtggaacggcttcgtccactcgcgcacagctttattggggttctcgccaaacaatagatttacctgttcaaaaccgccgccattcgtttctacacgagcgaaacatcccatctcgacaatggcaggcgctacctttaccagctggtctacacggggcacatattttccggcactttgccacatatccctgaataccaagctgaacttaatttcttttttcataccaaattattcctgtgtgtgtttatataagattagttatttcagagtttctccactttcgcaactttacccttgccttgcgtcactaccgtaaccgccgcactgatagccgccatgatgttgccgggaacagccgcaggagcatttgccgcctgtttggcaggagcgacctcttcgggtgcatatttattcacaagggcgataagtccctttcccaagtagattacaatcagcaggatggcaaagaccgttgccatacccactatcattagcaggagcgctatgttcaagttttccatattataaattattagttattctatcagatttgcaaaaaatcgtccgaaattagtaataatagacgagaatatagaatattacaatgataaattatgctaaaataaaagtaagaaaagagcaagtagccggtcactacatatcttccaacgacaaacaaaccgtctcaatccggtacttcggcaatagctttttctttaaatgttccacttttccagccagcagttccggtttgaagtttttcttttgccgcttcacttctgccgccacagcttgatttttctccaatttcagagcaataatatcaatttcattctgattgcccttcggctcccaccacgaacctatagcccgatattggaaactttcggcaaactgctgtttgaaatatctttccagcatgatacctgaataagttgaatagtcggatttgatgatggtctgcaaaccgataaagttcttaatctctatcagagaacggtagcggtcgaaatagttaaaccaaaaccggatgaaattatcttgtatttcataccttacagtttgacttccttcttttgccaataaaggacgctggcggacaatgatgttgtaatcctcaatcaaccgctttatttgaccgcctatgcttttgtctcccaaagctgcttctatttcgggttgcgtattaatgccaccggaaatagcacttaagatagaaaaataagtggcatagtttttcccgaactcttccaccagcagattttttccttcatcggtaaaagaagagttctcccgaaccataaatgaaatcatcccgtctacactcaattcggtgttgtcacaaagcagttcaacatatttcggaacaccccctgtaaaagaatagagggcaagcaaatcatcattgctgtaatcgggattgtaatcaaagataatctctttcaatgtagccaaatcaaaagcagacagtttaatgatattatcagctctaccgaacaagggctctttattgttctgaaatattttctgcatcaacgaataaacggaacccgatacaatcaaattcatcttagatttcttccgataggtatcccaaatgttttgcatatcgctatataccgattcattgatgttatagaactcctgaaactcatcgataaccaggttgaacggtttctgggaagacagttccatcagatactgaaataatgaccggaaagtacgtatttccattggaacaaatacatcaagcgattggccgataaccggaataaattcagaacaaagcgttgcttcacttttacgccccacaaacagataaacggttggcatatcttcaactgctttcattataaggcttgttttaccaatccttcttcttccggttaccactgttaagcgtgaatggtcgctgaaagacaaatcgcgtatccgccgcagctccgccaactcgcttttcctattataaaatttcatatttccaattttgttacggctgtaactgttacagcggttacaaagatataagaaattatctatatatactctgctttttcatttttccaaaagatttatgcgaattaccgtatttcattcttggggtatctatttttagtatctccattttttaccacatccattcacttttcctctaccattcatccccccacttcggaatacattctgaaagggtggcatgtcaaaattaaaattcgtttactttttgtttctttttagacacagaatacgcggatttcacggaaaaagaataaaaaaaatctgtgccttccgtgtaatccgcgtaatcctttagatttgcgtacctaaaaaacatcaagtgtattttaacacccttctgtcattgcgtaatagtatctatttacttagaactcgcttgtaaagtggaacttgatatgcttgaaatccatctgcgccatctgcagtacgtagccgctgtctgcaaggaacacatccctgccctcacggtctttcgccatatactggtacttgcgtttcttgaacgcttccagttcggcagggtcatcactttcaatccagcaggccttgtaaagactcaacggctcccaacggcatttggcactgtactcattttccagacggtattggattacctcgaactgcaactgccctaccgtaccgataatcttgcgtccgttaaactggttgacaaacaactgcgctacaccttcgtccatcaactggtcgatacctttggcaagctgcttctgtttcatcgggtcggcattctcgatatacttgaacatctcgggcgagaagctcggcagtccgcggaagtgaagcatctcaccctccgtcagcgtatcgccgattttgaacgtaccgttgtccggcaaaccgatgatatctcccgcccacgcctcatcgatggtagtcttgcgctgcgccataaactgcgtaggcgacgagaaacgcatagtcttgccatgacgcacatgcaggtagggcgtattacgggtgaacttaccggaacatatcttgcagaatgcgatacatgagcggtggttcgggtcgatattggcggtaatcttaaagataaagcctgtgaatttaggctcttccggttctacttcgcgttcttccgccttcacgggacggggactgggagcaatctccacaaagcagtccagcaactcctgcacaccgaagttattcagggcggagccgaagaacacgggagccaattcacctttcagatactcctctacctgaaattcgggatacacaccgtctatcagttccagttcgccgcgcagcttgtccgccagtgccgaaccgatctgattatccagttcttccgtatttatatctacttccaccttttccgtcaccacctgcttggaaggctggtaaagattgagattgcgttcatagatgttgtaaactcccttgaaacggggaccgctctcgataggccacgtcagcgggcggacgtggatggagagttcctcctccagctcatccagcaagtcgaacgggtcttttgcctcacggtccatcttattgatgaagataatcaccggagtgttgcgcatgcggcagacttccatcagcttgcgtgtctgtgtttccacacctttcgcaccgtccaccacgatgataacgctgtccaccgccgtcagtgtgcggtaggtatcttcggcaaagtcctggtgacccggagtatcgaggatattgattttgtaatcgtgatagtcgaactccattacggaagtggttacggagataccacgctgtttttcaatatccatccagtctgacgttgccgtcttctttatcttgttgctctttaccgcacccgccacctgaatctgaccgccaaacagcagcagcttttcagtcaacgatgtcttaccggcgtccggatgggcgataatcgcaaaggttcgtcttctcgctatttcttgattacttgccatatatataaggtataatattcaaataagtattattttgcttactgcgccagcctatcgatgcagacctgcaagctatcctcccaatggggaatctcgataccgaaagtctttttaatcttcgtcttatccaatacggaatactgaggacgcggagctttggccggatactcgtccgtatgcaacgggctgactttacacgaggtaatgcccgccatgcggtgaatggccaccgtaaaatcataccaggagcatactccctcgttactgaaatgataaataccagggacgatgccctgattgacagccgcaaagatggcacgtgccaaatcgttggcataagtcggcgtaccgatttggtcgaaaacaactcccaaccgctcgcgttcattacccagacgaatcatggtctttacaaaattattgccgtaaatggaatataaccatgccgtacggataaccatcgcacggctgcacttctccataacagcctgctcacctgccagttttgtagagccgtaaacggagttggggcaaggagtgacttcttccgtataaggaatatggccgattccgtcgaacacgtaatccgtagagacctgtatcatggcagcaccgcaagcctcggcggcggcagccagatagccgggagctatatggttcagtttattgcaaagttcgggattgtcttctgccttgtccactgccgtataagcggcacaattcacaataacatccacccgattatcggtcacgaatgcacgtatggcctgttcatcacatatatccagttcctgcacatctgtaaaaaagtaagtgtgttgctgattttcagcagagagcacccgcatctcattgccaagctgaccgttggcaccggttactaatatattcatcttaacagttactatttattccctatggttatgatacctcttttatcttcaacacacaggtacgttgactattttcagttttctatttattacccgacttattaccctgcttcatgcagacattccgtcagtcattatccagtttcaactcgcctttcctctctttgtcgtaataattggcaagcagggaaagaaaactgctgatggcttctatcgccttggcagtgccctggctgatttcctttttctgcaaacgcagcagcagtatgccgtaaagcgcctcaaaacaggtctccaattcggattcttccgtttgtccgctcttttgccgcaattccacaataaaaggcaacgctttgaaatatgccgcattataaaagggatacttcgtggaagccagcaaatcggcatgcaggtccgtaaggttgcggataacgttgcggttaatctgcaaatgccctttctccgtcaccccctcggcacgcatcatatcggcaagattgccgtaccactcctccagagccgcatgttcttcggcaggataacgggagatgacgttgctgcgaatcaagtctatatcgcacttgttagcacgaagcaaatcctctacttgccacatatatataaggtattcggcaatattcttctctttcagttgctgtgaaatcttcacgttgagatgatttatgatttataatttatattcttcaccaagataccgcggtccgctcccgtaactaatagagcgattcgcccatcagcgtaaacaccagtccgaatgcagatactaccatgacaatgccgccgataatacggttcaatatccaaatgccgcgtaaattgaattgcgtacggaccttgttgacaaaaaaggtaattccaaaccaccacgtcaatgctcccaaagcaatggcaagataccccgtaacggcctcaaagaccaacacgccttcgcttacaaaagcaaagcgcgcaaaaaggcctacaaaaagaaatatgataagcggattggagagagtgacagcgaacgctgtgataaaattgtgaaaataagaccccttgctggtagataccggacgaatggactgcaccggattactgcggaatgtatagataccgaatatcagcagcaggatactcccgaacagttgcagatagaagatattcttgttgacataatcgaatacgaaactcattccgtagcctgtcagcaaagcataggcaatatcactcaacgaggcgcctataccggtcacaaaaccataccaacgccctttgttcaaagtacgctgaatgcacaatactcctacggggcccaacggtgcagatacgataacacctattatgaaccctttccataatatgtcaagtatggtctctatctgaatcatgcctgcaaatatcggacttttttatgagacaaccgaatagagttaacgttttttcgtcagaaaaggagtttagatacaaagtcaatcatccggcggggcggacttcccccgttccactgaagttttttatttccttttctttctcccacccgacgattttctttatctttgcgccaaaagcaaaggtaaactgcatcccggcataaaaaaacagacaagttcgttttattctgcctccggtttgcactatctttgcacccaggaagaaaagagaagaagctaactgacagacaatagaatagtttcaatcacaaagtagcaaatcgtaaactcttaaataaaagtatgattctttttttcagaacaccatccaagagcgtgattgccgtagaatgcgaccacgaacttacccaggcagacagcgacaaactctgctggctttttggagaagccacccccgaaagtgaagacaacctgaaaggacatttcgtaggtccgcgccgcgagatgattactccctggagtaccaatgctgtggaaatcacccagaacatgggtctgaacggtatcacccgtatcgaagaatatttccctgtgaaagatgaaaatgcagaccacgacccgatgctgcaacgtatgtataaaggtctggaccaaaacgtatttacgaccaaccgccagccggaaccgattattcacattgacgatctggaagcatacaacgaaaaagaaggtctggcgctctccaaagaagagatggactacctcaagaaagtggagaaagacctgggacgtccgctaaccgactccgaggtattcggttttgcgcaaatcaactccgagcactgccgtcacaaaattttcggcggcacattcatcattgacggagtggagcaggaatcttccctcttccagatgattaaaaagaccactcaggaaaatccgaacaagattatatcggcctataaagataatgttgcctttgccgaaggtccggttatcgagcagtttgccccggcagaccactccaagcccgacttcttccagataaaggacatcaagagtgttatctccctgaaagccgaaacccacaacttccctaccaccgtagagcctttcaacggtgcatctaccggtacgggcggtgaaatccgcgaccgtatgggcggcggtaaaggctcatggcctattgccggaacagccgtatacatgacttcctacccccgcacggacgaggaccgtccctgggaagagatacttccggtgcgcaaatggctgtaccagactcccgaacaaatcctgatcaaggcatccaacggcgccagcgatttcggaaacaagttcggccagccgctgatttgcggttccgtactcacctttgaacacaaagagaaagatgaggtgtacggttacgacaaagtcatcatgcttgctggcggtgtgggatacggtacacaacgcgactgcctgaaaggcgctcccgaagccggcaacaaggttgtcgtgatcggtggcgacaactaccgcatcggtttgggcggcggttccgtgtcatccgtagatacgggacgctacagcagcggcatcgagctgaatgccgtacagcgtgccaatgcagagatgcagaaacgtgcttacaacgtagtacgtgcgctttgcgaagaagacaccaacccggtggtttccatccacgaccacggttctgccggacatgtaaactgcctgtccgagctggtagaagagtgcggcggacttatcgacatgagcaagctgcctatcggcgacaagactttgtctgccaaagaaatcatagccaacgaaagtcaggagcgcatgggtctgctgattcaggaagaggccatcgaacacgtacgtaaggtagccgaacgcgaacgcgctccgatgtatgtagtcggtgaaaccaccggcgaccaccgcttcgctttccagcaagccgacggcgtacgcccgttcgaccttgccgtagaacagatgttcggctcttcacccaaaacctatatggtggacaagaccgtagaacgtcattatgaaatgccggaatacgaattgtcgcaactgcacgaataccttaccaacgtactccaactggaagccgttgcctgcaaagactggttgacaaacaaggtagaccgttccgtaacaggtaagattgcccgccagcaatgccagggcgaactccagttgccgttgagcgactgcggtgtcgtagctttggactatcgcggcgaaaaaggtatcgcaacttctttgggacatgctccgcaggcagcccttgccgacccggcagcgggttctatcctctccgtcagcgaagcgttgaccaacctgatctgggctccgcttgccgaaggtctggacagcgtgtccctgtcagccaactggatgtggccgtgccgctcgcaagagggtgaggacgcacgtctttatacggcagtaaaggcattgagcgacttctgctgcgccctgcaaatcaatgttcccacgggtaaggactctttgtccatgacgcagaaataccccgacggcagcaaagtcatcgctccgggtacggttattgtatctgcaggcggcgaggtttcagatgtgaagaaagtggtatctcccgtgcttgtcaacgatgagaaaaccacgctgtaccatatcgacttcagtttcgacaagctgaagctgggcggctccgccttcgcacagtcattgggtaaagtaggcgacgaagtaccttgcgtacaagatgccgaatacttccgtgacgctttcctggctgtacaggaattaatcaacaagggacttgttcttgccggacacgacatttcggccggcggtcttatcactacgttgctcgaaatgtgcttcgccaatgtagagggcggtatggaaatcaacctcgacaagatgaaagagcaggacctcgtcaagatattgtttgccgagaacccgggtatcgttatccaggtgagcaacaagcataaggaagaagtcaagaagatactggaagatgccggtgtaggctatatcaaaatcggtaagccgaccgacgaacgtcatattctcgtaagcaaagacggcgctacctaccagttcggtgtggactacatgcgcgatgtctggtactcttcatcgtatctgctggaccgcaaacagtccatgaacgggtgcgctaagaagcgtttcgagaactacaagatgcaaccgttggatttggtgttccggcctgaattcaagggtaaactttcgcaatacggcctcgacccgaaccgtcgtaccccgaccggtatccgtgccgccattatccgcgaaaagggaaccaacggcgaacgcgaaatggcctattcactctatcttgccggcttcgatgtgaaagacgtaaccatgaccgacctcatcagcggacgtgaaacgctggaagacgtaaacatggtggtttattgcggcggcttctccaactccgacgtattgggttccgccaaaggttgggcaggcgctttcctcttcaacccgaaagccaaagaggcgctcgacaagttctatgcacgcgaagacacgctgtctctcggcgtatgcaacggttgccagcttatgatggaattaggcctcatcactcccgaccacgaaaagaagggaaagatgctgcataatgattcccataaattcgaatcgacctttatcggcctgactatccctaccaaccgcagcgtaatgttcggctctttgagcggcagcaagctcggtatctgggtggcacacggagaaggaaaattctcattgccttacgatgaggacaaatacaatgtagtggcaaaatatacctacgacgaatatccgggcaatccgaacggctccgactactccgttgcggcaatagccagcaccgacggacgccacctggccatcatgcctcacctggaacgctccatcttcccgtggcagaacggctactatccgcaagaccgcgttcacagcgaccaggttaccccatggatagaggcatttgtcaacgcacgcaagtgggtggaagaaaagactggaaaataaccacgtgtaaaactgtaatgcaataatggataatgtgccaaagactctgcttttgcaggagctttggcacatttcttatatctccacaccgccttccatcctgccgctttaccactctgtatttccttttttgcatatctcaaacattttcactacttttgtgttaatattaaatccccccaactttatcaaactcaaataccaaaatcggctaatatgaaaaagcatttctttttctttcttttccttatatcatcctttctggctgccgctcagacatataactacatcggcgtagaggatggtttgagcaacaggcgggtatatgcgattcaaaaagggcctaaaggttacatgtggttcctcacgcacgacggcatcgaccgttataacggaaaggaattcaagcactataaactcatggacggcgaagatgaaatcaactccatgatgaacctcaactggctgtattcggattcgcagggaaggctatgggaaataggcaagcaaggacgcgtgttctgttatgaaagcaagcacgaccgtttccaactggtatataaattgcccaaaagcgagacggaaggcctgcacactcccgtcagctatggatttatcgatgataataatataatatggctctgcaaccaaagaaacatttacctatataacagcctgacaaaagcaaccgttgtcataaagaatgaaatcaacgaaagcattaccgacatcgagcagatagacgagacccactattttataggcacggatgtaggcgtgcattatgccgaactgaaaaacaatgtgcttgcgctaagcccttgcgagaaactggatacgctaagactgcaaatcaacgagctgttctttcataaaggcagccgcaaaatctttatcggaacctttcaaagaggtatctatgtatacgatctgaaccttcataaggcgttccacatcaaatccggcctgatagatgtcagcatcaaccgtatctgtactttcggtgaaaaagacatattgatagcgacagacggtgcaggtgtctacaagatggatgtggacacttaccggtccgaaccgtacatcgtggccgacttcaaccgatataacgccatgaacggcaatacaatctacgacatatacgtggataacgagcaacgcatctggatggcgaactatcctatcggcattaccgtacgcaacaaccggtacagcgattacaaatggataaagcattccatcggcaacaaacagtccctcatcaacgatcaggtaaacgccgttatggaagacgaagagggcgacctatggtatgccaccaacaacggcatcagcctgtatgagcatcgtacccaacaatggcattcgttcttgagcgtctacgataaggagcagaagaaccagagccatacattcatgtctctgtgcgaggtcagtcccggcattatctgggtaggcggctacagttccggcatctaccagatagataagaaaaagcgttctgtcagctttttcacgcccgccttgttcggcggcgcaacgattcgtcccgacaagtacatccgttccattaccaaagacagagacggttatatctggtcggggggatactacaacctgaaaagaatagacctgaaacataaaaacattgaatcgatacccgggctggaagtcataacggacatcaaggagcgggacgaaaaatacatgtggataggtacagccaacggcttatacctgctggagaaagcaaccggcaaataccggtacataacgctgccggtagagtcctcctatatatactccctgtatcaggcccccaacggactgctgtatatcggcacaaacaattccggtctgctgatttacgaccctgccaggcagaactttgaacactatcataaagataactgcgcacttatctccaacaatatctatacaattctgtcagacggaaaagatgatattctcttaagtacggaatacggactgagcggtttctacctcaaagaaaaaagattccataactggaccaaagaacagggactgcattccgaccatttcaatgccaattccggaacactgcgcaagaacgggaatgccattttcggaagtaccgacggagccatagaatttccaagagacatggtattgccccgcgagtacagttcgcgcatgatattcagcgatttgcgcgttttctaccaaacagtataccccaaagacgaaggttctcctttggttttggatatcgacgaaaccaaaagcctgaaactgaaatacagccagaatatattttcgcttcaggtatcgtccatcaattatgactatccttccctcatcctgtattcgtggaaactggaaggattctatgacggctggagccgtccgggagaggaaaatgtcatccggttcaccaatctgaatcccggccattacaccctgcgtgtccgcgccatatccagtgaagaccggcgtatggtcttggaagagcgcagcatagatattattgtcgagcaacccatctggctcagcatatgggcattattactgtatgcgcttatccttgttgcgattgcaagcatcgcattgcgcataatcgtattgcgcaagcaacgaaagatatccgatgacaagatccgtttctttgtcaacaccgcgcatgacatccgtactccgctgacgctcatcaaagcaccgttggaggaactctccgaccgtgagaaactaagcaaggaaggaacggacaacctcagcacggcgcttcgcaacgtcaacgccctgctacgtctcacaaccaacctcataaactttgaacgcgcggatacctattcgaacaatttctacgtatccgaatacgaactgggagcttatatgaccgacattgttaatgttttccgttcatacgcttccgtaaagcacatcgacctgacttacgaaagcaacttccgctatctgaatgtctggctggataaggataagatggactccattttgaagaatatcatatccaatgcactgacatacacgcccgaaggcggaagcgtgcatgtctatgcttacgaaacggaagatacctggaacgtggaagtcagtgacacaggtatcggcattccactggacgagcagaaaaagctgttcaagatgcacttccgcggcagcaatgccatcaattccaaagtaaccggcagcggcatcggactgcttcttgtatggaaactcgtgcatatgcataaaggaaagctcaacttcaccagcaccgaaggaaaaggctcctgcatcaaagtatctttccctaaaggcgagaaacgctaccgcaaggccatacaccgtcctgctcccaccaaagagcaggaacagaacaatgaaccggaacaaatcacctctccggaaaagggaactccggacacccccgccgtcaacacgcccatagagggttacgaacatgcccaacagcaaactcaggatgccggtaaccgccagaagatactgatagtagaggataacgacgaactgagggaatacctgcggcgtacgctggcggagaactaccatgtacaagtatgttccaacggaaaatcggcgctttgtatcgtgaaggagtatttccccgacctgattatctcggacatcatgatgcccgaaatgcggggtgatgaattgtgccagaaagtgaagaatgacattgatacctcgcacatccccgttatcctgcttacggccctcaatacggacaaaaacatcatcgacgggctgcaaaccggagcggatgaatacgtcgtgaaaccgtttaacatcggaatcctgcgcgccaccattgccaatctgcttgccaaccgtgccttattgcgccacagatacggcaatctggagctgaacgatgatacccacaacacggaatgcatcaactgttctacggatttggactggaaattcattgccagcatcaagaagaatgtagaggacaacatggacaatccgagcttcacgattgatgtgctttgcaccctgctcaacatgagccgtaccagtttctacaacaagttaaaggcactgaccgaccaggctccgggagattatgtacggttgatacgcctgaaacgtgccatgcaactgctgaaggaacaaaagtacaccatcaccgaagttgccgaaatgaccggtttcagcgatgccaaatacttccgtgaagtctttaagaaacactttaatatcagtccgagccaatatgcaaaagaagaaggaaatattggagagggcaaacaataaaccgaattacagcattacacatgatatgacgaatatatataccgaagcattttccattttctttaaaatcggagcattcaccattggcggcggctatgccatggttccattgattgaggacgaaatcgtaacgaaacgccggtggatagccaaagaggattttatagatctgcttgccatcgcccagtcggcaccgggcatccttgcggtcaacatatccatattcataggctaccgcctgcgtggaatacggggaagcatcgttaccgccctgggaacgatactgccctctttcctcattatccttgccatagccttgtttttccataacttcaaagacaatgtctacgtagagcgtatcttcaagggtatccgtccggcagttgtagcactgatagccgctccgactttcagtatggccaaatccgccaaaatcaaccgctacacgatatggattcctgttgtctcggctctgcttatctggttattgggcttctcccccatctggattatcattgctgccggtataggcggatacctgttcggaaggctgcgcttcccgaaaaccaacagttaaaaattaaacaaaaccaccccacttatcgctaatcactaaccactaatcactacatcatgcttttcctccatctattctacacattctttaaaatcggcctgttcggttttggcggcggatacgccatgctgtccatgatacaaggtgaggtagtcacccgttacggctggctcacaccacaggagtttaccgacatcgtagcaatcagccagatgactcccggtcctatcggcatcaattcggcaacctatgtaggctattccacgatagccgaacaatacggcacgagcatgggagtgcttgggtcttgcatagccactttcgccgtagtgctgccttcgttcatcctgatgctcaccatcagcaaattctttctgaaatatcagaagcacccggcagtagaagccgtattcagcggacttcgcccggcggtagtaggactgctggcatcggctgcgctggtgctgatgaacacggagaacttcagttcgcctcaggaagatatgtactctttcatcatcagtatcatcatcttccttgcagctttcatcggaacaagaaaatataaggtcaaccccatactgatgattatagtatgcggaatagcagggctgatactttattgatagttggcagttgattcctacagcttcactttcttgcttacagacttggattcgttgtgcaggcggtcgagcgccgtaactacataacggtacttcgtcttgccatcctcataaggcaacttatagaaagtattgcgcgtaacagccacaatgtgcgaagggtcgtcgatgtccaccttctctttcgaagcaaaacggtagacaacatactgtaccggacggttcatttcatccttgaacttcggagcagtccagaaaaggatgtaaccgtcggcagtccacaccggttttaccttgcgcaccttatccggggcttcattgtccataaagtcaaatacgggtggcaaagccggatacttatggtactcggcaaccagcgcatcgcggtatttgccggcattctccactactgcgctggcaggccattggcaactgccgccgattgtctgatatgcccgctgcaaagccatcttgcggggaagctgattgacggacggattcttcgggtcggcattctgtaccgtattcattacagactgtccgataaacaaaggacggttctccgtatgctttgcccaccacttcaccaaagtttcatagtcggcagccggatgtcctatctgccaatacacttgcggtatgttataatcaatccagcctttgcgtgcccacagaagtacgtcggcatacaaatcatcataattctgcaaaccgtttgtggcgctgcccagcgggtcgctgctctgattgcggtagataccgaaaggactcacgccgaacttcacccagggtttcagtccgcgaaccgtctcatgtattttctgaatgagaatattcacattactgcggcgccagtccgccttattgctgaaaccgccgccatagcgtgcaaagctggcatcatccgggaaatcctttcccttgataggatagggatagaaataatcgtccatgtgaatggcatccacatcatagcgcgacacgatgtcggttatcaccttacagatatgattgcggctttcgggaagcgcaggatcgaagtaaagctggtcgccatacgtcacgaaccactccggatgcgaattataaatatggataggcgaaagctcgttcttcaacgaagtctttacccgatacggattaatccaggcatgaaactccatgctccgcttgtggcactcctcaatcataaactgcatagggtcccaataaggttccggggctttgccctgcacacctgtcaggaaacggctccacggttcgtactgcgaagcatacaacgcatcggcttcgggacgcacctgaaaaataatggcattgatacctgcaccttgcagggagttcaactgatttatcaagatttgcttcaaccggtcggtcggtatgccacggaactgtccgtttaccgcctgaatccatgcagcacgaaattcacgtttaggatgtgcagatgtggatacgaactgtgcctgtacagccagtgaaaggcagcagaaagccagtaacaagaggagatttctcactttcattttattctttttaaatattgtgtcgcaaagataatgattatctttgcaactcaattcattttcaatcgtcttatggcaaaaaatacatctatcatcataaagggggcacgcgtcaataatctgaaaaatattgatgtggaaattccccgcaacaaactggtcgtcataaccggactgtccggttccggcaagtcctcgctcgcattcgatacactctatgccgaggggcaacggcgctatgtggaaagcctcagcagttacgcccgccagtttttgggacgtatgagtaagcccgaatgcgatttcatcaagggtatcccccctgccattgccattgagcagaaagtaagcagccgcaatccccgttccaccgtaggcacttctaccgaaatctacgaatacctgcgcctgctctatgcccgtgtgggacggactttcagtccggtcagcggacaggaggtaaagaaacactccaccgaggacatcgtgaactgcatgctccggcaacctgagggaacacgctataccgtgctcaccccgatattgctccgcgaaggacgtactttgcagcagcaactggaaatagacttgaagcaagggttcaaccgactggaagtgaacggagaaatggtgcgcattgacgagtatcagcctaaagacggtgacaccgtattcctattggtagaccgcatgacggtttccggcgagaaagatgccgtcagccgcctcaccgactccgccgaaaccgccatgtacgagggtgacggagcctgcctgctgcgtttctaccaaccggacggcactaccagcctgtaccgtttcagtaccaagttcgaggcggacggcatcacgtttgaagagcccaacgaccagatgttctcgttcaactcccccatcggcgcatgtccggaatgcgaaggcttcggacgtgtcgtgggcatcgacgaacatctcgtcatccccaaccgctccctttccgtatacgacggcgccgtggtgtgctggcgcggcgagaaaatgggcgaatggaaagacatggtgatacgcggtgcggagaaagccagcttccccattttcactccctactaccagttgacagacgaacagcgccgcatgctgtgggacggaacccgctacttcgagggtatcaatgctttctttaaaatgttgcaggaaaaccagtacaagatacaataccgcgttatgctggcgcgttatcgcggcaaaaccctttgtcccaaatgccacggtacaaggctgaagcccgaagccggttatgtacgggtgggcggacgcagcatctccgaactggtagacctgcccattaccgaactgaaagtgttcttcgacaacctgaagctggacaagcatgatgccgacattgcccgccgcatccttatagaaatcaacaaccgcatccgcttcctgctggatgtaggtttgggatacctcaccctgaaccgcctcagcaattcgctgtccggcggtgaaagccagcgtatcaatctggcaacttccctgggaagcagtcttgtgggcagtctctacattctggacgaaccgagtatcggacttcacagccgcgacacggacaagctgatacacgtcttgcgccaactgcaacagttgggcaatacggtggtcgtggtggaacatgacgaagaaatcatccgggccgccgattatatcatcgacatcggtcccaaggccggacgtcggggcggcgaggttgtctaccagggagacatgaaagatttgcaaaaagacagcaacagctacaccgtgcgttatcttctgggcgaggaaaccattcccgtgcccgaaagccgtcgcccgtggaatcagtatattgaaatcacaggcgcccgcgagaacaatctgaaaggcgtggacgtacgctttccgctcaatgtaatgaccgtagtcaccggcgtatcgggttccggtaaaagcacactggtgcgcgatatcttcttccgcgccctcaaacgcgaactggacgaatgcaccgaccgaccgggcgagtttgcctctatcagcggagacctgcgaaatctgcgcaacgtagagtttgtagaccagaaccctatcggcaagtcctcgcgttccaaccccgtaacctacataaaggcctacgacgaaatacgcaaactttgggcagagcaacccctcgccaaacaaatgggctataccgccggccatttcagcttcaacagtgaaggcggccgttgcgaggagtgcaagggcgaaggaaccatcaccgtagagatgcagttcatggcggaccttgtgctggagtgcgaatcctgccacggcaaacgcttcaaggcagatacgctggaagtgaaattccatgatgtcaatatctacgatgtactggaaatgaccgttaaccaagccattgaattcttcaccgcacacggacagaagaaaatcgtaaagcgcctgcaaccgctgcaagatgtggggctgggatatatcaaactcggccagtcgtcctctaccctctccggcggtgagaaccagcgcgtaaaattggcctactacctcagtatggagaaagccgaccctacgctattcatcttcgacgagcctaccaccggcctgcacttccacgacatccgcaaactgctggaagcctttgatgcactgatacgccgcggccattccatcgttatcatcgagcataatatggacgtagtgaagtgtgccgaccatgttatagaccttggccccgaaggcggagacaaaggcggttatatcgtggcaaccggtacaccggaagaagtggcggcatgtgcggcaagctacacagggcagttcctaagagaaaaactacaataaccaaacgtacaattccgtcagaaacatcccgtaagatagattaatccgtcttacgggatgttttttcatctcacgaaacaaaaaatcgtctcctaagacgaaacaaaccatcttaggagacgaaatcagatattgtgcaaaaagagctttttcttttttagaagtagaaaccgaatcccactttcagaccgaactccgaacggtctttatttatatcccaataaacggcaggctcgatagtgaccgtacgcgacaggaagaaagcataaccgccctccatgccgaagccgaaacgggttttatcgccaccgtcccagttgtaacggttcaagtttacatcagctcccagaaatacgccaattttgttgaaatagtaacgtccgcccacacccaacgtatagacatccgttccgccgccttgccatgtagcgccggcatccagcagcaaagccacgttatcgattaaaaaagcaccgcccttgacctcaagaccgaaatgagccttatccgtttccgtattgtaggaaaaattaagtccggtaacggaagggttgacgaaccactttcctttttcaaactgcgcgtgggcagccactgtgccaataagcaggcatacgatcaatgcaagtcttctcatcttgttttcgtttttaagtgaataattattttcgttctattttatcttcttcacggcgcttacgctgcaactcctcttttttgcgcagcaccagccacaacgccagtacgatgacatacgaagcgattacggttacatatttctccgtattgctgatttccgtattgcgcggcaggaaatacgccgcagtggcagaaacataaataagcagggctacggtcagcccggtagatttcttgagtttcttcatcggtttaagagttttttagtctgtttgtcttttcttccatagcacgaaccataccaaagctatcgccacaccggctgctcctatgccgtaggatgccggatgcgacaggccgaaaccttcgggcgctatacagatatacgttgtacagacgcaggtcatgaaaagggcaggtatcagcgtcaggaaatacaacttcctcgcacgcaccagatacactgtgacagcccatagggtaaagacggacaaggtctggttggcccatgcaaagtaacgccatatcatatcgaaaccgtccttatcgcgcaggctatacagcaacagtccgatagcagccaaaaacatcggaatgcagatatataaacggcggcgcatcgttttttgttccatccccaggaaatctgcaacgataagccgtgccgaacggaaagcggtatcgccgctggtaatgggggctgcaatcacacccagtatagccagtacgcctccgattgttcccaaccagtctttcgtaatggcatccacaatgacggcggcattcgtctccgccattctgttttcatggaagaagcaagtagcggcggcagcccagataagggccacgatgccttcggtaatcatggctccgtagaatatgggacgtccatggcgctcgctcgtcatgcagcgtgccatcaaggggctttgcgtggcatgaaaaccgctgatagccccgcacgcgatactgacaaacataatgggaaatacaggcagcgccgaagcgttgggatgggtattctgcaatccgtcccatacttccggcaatgccggatgcttcacgtagagcataaccaaaatgcccaccgccataaacagcagcgcaatggcaaacagcggatatatcttgccgataatcttatccaccggcagcaaggtggcaagtatataatagataaagaccaccacaatccagaaaacagtgtccagcgtttccggcgtcaggctggcaagcagtccggcagggcctgccacaaacacggctcccacaagtatcatcaggacaacggtaaatccgcgcatcacctgcttggtagtcacgcccagataacggcctataatctccggcaggctctcgcccccgttgcgcaacgaaagcattcctgcaaaatagtcgtgcaccgctccggcaaaaatacttccgaacactatccacagataggatgccgaaccgaatttcgctcccatgattgcaccgaagataggtcccaggcctgcgatattcaggaactgtatcataaagattttccacgtaggcagcgggatatagtccaccccgtcggctttggtaatagcaggagtcttgcggtcgtccggtccgaatacgtgttctataaagcgtccgtagatgaaataacctgcaaccaacgccagcaggcagagcgtaaatgtaatcatggcgtgctaatgtttaatatacagcaagtgttaataatgtattttatgtatgcaaatgtaacggtttctaactaaactacgcaattttatcaggtgatttacgtatcttcgccgtgaaatataacagaaataaagaagtaaaaaggaatttgtttcaccgtagaggagaaatcatcatttaccgaaaacaagacagcaacatgaagaaatcaagccttatactattatatatcttctgtcttcttccccttgccgcccagcggccgcccaagcacgaggtacgtgccgcatgggtcaccgccgtctacggactggattggccccgcacccgcgccaccacgcccgagagcatccgcaagcagcaggacgaactcgtagagatactggacaaactgaaagccgccaacttcaacaccgtactgtttcagacccgtacgcggggcgatgtgctctacaaatcgtccatcgagccttataactccatcctgacaggaaaaaccgacggcaaccccggctacgacccgcttgcctttgccgtagccgaatgccacaaacgcggtatggaatgccacgcctggatggtgaccattcctttaggcaaccgcaagcatgtcgccgccctcggcaaggcatcggtcaccaaacgcaaacccgctatctgcgtaccttataaacgcgagtatttcctcaatcccggacatccgcagaccaaagaatacctgatgagccttgtccgcgaagtcgtggaacgttacgatgtggacggcgtgcatttcgattacctgcgctaccccgaacatgccctgcgcttctccgacagctatacctataagaagtacggcaacggacgcgacctcgcgcaatggcggcgtgacaatatcacggaaatagtccgttatctctataaaggcgtcaaggcgctgaagccctgggtaaaggtgagcacctgccccgtgggtaagtaccgcgacaccgcccgctatccgtcgcgcggctggaatgcgttccacaccgtctatcaggacgtacaaggctggctgggcgaaggcatacaggaccagatatatcctatgatgtacttccgcggcaacggcttctatcctttcgccctcgactggcaggagcaaagcaacggccggcagattattcccggactgggcatctacttcctcgaccccggcgaaggcaactggactgtggacgaagtggaacggcagataaacttcacccgtgcacacggcctggcgggcgaaggccactaccgcgtgaagtaccttatggacaatacgcaggggttgtatgacatacttcaagagaactactataccgcccccgccatgcaacccgccatgccgtggatagacaatgtgccgccaaccgcccccacgcaactcaacgtcgggaagctggccgacggatactggaaaatcacctggcaagccgccactgacaacgataaacggaatgcgccgacctatgtagtctacggttccgatacgtatcccgtagataccgccaacccggaaaatatactggcgcaacgcatacagggaaccgaatacatatatgcccctatccgcccctggaacacccggaaatactttgcagttaccgccgtagaccgttgcggcaacgaaagtcccatctgccaataggaaacacaaaggcaatgcgtttatagtcaaaaggatgcatgtaccaaaagaattcctcatttggtacgtctcgtacctgactgtggtacgacgtgtttcttaccatggtaggacgtgtaccttagtaaggtacttgacgtaccaagcggcaggtacatcaggtaccagccacttgaaatatgcatcaacagcaagaatcatatccggacatacgctctgtaacagcttttacccgtaacgggcactaacggcaaataaccggaagcaagtctgccctgctccaccattaacggataatcgtgcatatcctgttcgtgccgtgcacgcaatgtttcattatcgggaacgtattcaacagcaaaacatcccttactgccgggagccacaaacctgtcgtaaaacaagcgggctacaacacccatattcatacgcatatttatctccacgcaaggatgtacacgatatccgttctccttgtctgaccggcaaaccatcatatccactcccagataaccggtatacgtgttcccatagattgaggccaattccgcacgcagcgcttcgcgtatacccgtcaacttctcaaggggcagacagcatgcgatactttcctctatctgtccgtccgatgcaagcagattgcccgtataggcgccatgctcattggtggagaacacggaatagcccgcaaagcgcacttcgccctgtccgtccgaatagaactcaagggcaaaatccttcaccttattatatatgggttctgccgtaagacacccctgctctctcaaaacccgttcacaccaattggagacgggcttcgtaaacccatgcagacaccagttcagcccctttccgctacccgaccagggtactttgagcaggcaggcgtgcattgcattcaccgtgcgttcacaatccgcaatattgtttaggagcgtatgttcgccgcaggtgcattcgggatagcggtccgtcatgcgccgggtcaccgccacagcctgcagacgggaagagagcagcctgtattccgcaagaagccggggagaaggcagtctgtcttcacgaactccccctttcagaaagaacctgcggatggcaggattccagccccacggcacaattcgggcttcggcataatcgggcaactcaggctcggtgaccagttgcacctgcaacccgaagagttcccgcatccgcttcaagaaatccgcattgtaagcggaaggcgccagtaccgcactgcccggagcggcataccatatcggcagcaaagccatgtcctgcgccatacggcgggcggaagccggggctatgtagttcgcttcgttattggcaagcgcaaggtctgaatccggattgaaaagatatagttccatcgattatagttcataattattcggaactgcaaacttacagagaaaaagaacagcatacaaatatataaaacttaactatgaaataagatattttgctatctctactttgcaattctataaaaaaggcgtatatttgtcgcccgataaaccgaatttaaagcatggaagcattttaccgaacacacgcttatctggtagagcatacaaatgcccccgttcgccgcgacctcatggatgagattgactggaacgaccgtcttatcggtatcaaaggcacccgaggcgtaggcaagaccacattcctgctgcaatatgccaaagagaaattcggtaccgaccgctcctgcctctttatcaacatgaacaacttttacttctccggtcacagcctggtggacttcgcttacgaattccagcgccgcggcggaaaggtattgttgatagaccaggtgttcaagcaccccgactggagcaaggagctgcgcctgtgctacgaccgttttcccaatctgaagattgtattcaccggctcgtccgtgatgcgcctgaaagaggaaaatctggagttgcgcgacattgcgaaaagttataacctgcgcggtttctccttccgtgagtatctgaacctgcagaccgacatgaagttccacgcctactcactggaagaaatcctgagcaaccacgaacagatagccaaaggcattctgtccaaagtacgcccgctggactattttcaggactatatgcaccacggcttctacccctttttcctcgaaaagcgcaatttctcggagaatctgctgaagacgatgaacatgatggtggaagtggacatcctgctcatcaaacaaatagagctgaaatatctgtcaaagataaaaaaattactatatttgttggcggtggacggcccgaaagcgcctaatgtgagccaattggccaacgatatacagacatccagagctacggtgatgaactacatcaagtatctggcagatgcacggcttatcaacatggtatatcccaaaggagaagaattccccaaaaagccgtcgaagataatgatgcacaattccaacctgatgtactccatctatcccgtaaaggtggaagagcaggatgtgctggaaacgttctttgtaaacaccatgtggaaagaccacaaagtgaacaaaggcgacaagaacatttcgttcatggtggacgaagtgatgcctttcaagatttgtcaggaaggcatgaggatcaagaacaatccgggagtgacgtacgcattgcacaaggcagagataggccggggcaatcagatacctctctggctgttcggcttcctgtattagatttacagacaaagagttttttttacttaataaattcaatttagttatgactaaacagaagaaattcattacttgtgatggtaaccaggctgctgcacatatctcgtatatgttctcggaagtagctgccatctaccctatcacaccctcttctacgatggctgaatacgtagacgaatgggctgccgcaggtcgtaaaaacatcttcggcgaaacagtattggtacaggaaatgcaatccgaaggcggtgctgccggcgccgttcacggttctttgcaggccggtgcgctgactacaacgtacaccgcttcacaaggtctgttgctgatgataccgaacatgtacaagattgccggtgaattcctgccttgcgtgttccatgtatccgcacgtactttggcaagccatgcgctgtgtatcttcggtgaccaccaggacgtaatgtctgcacgtcagacaggtttcgccatgttggccgaaggttccgtacaggaagttatggacctggcgggtgtcgctcacctttctacgatcaagagccgcgtaccgttcgttaacttcttcgacggtttccgtacttctcacgaaatccagaagattgaaatgctggagaacgaagacctcgctccgcttatcgaccaggaagcattggctgaattccgtgcacgtgcactgaacccgatgaacccggttgcccgcggtatggccgaaaaccccgaccacttcttccaacaccgcgaatcttgcaacaactactacgaagctgttcccgctatcgtagaggaatacatgaacgagatttccaaaatcacaggccgcaagtacggtttgttcgattactacggtgcagaagatgcagaacgcgtaatcatcgctatgggttctgtaacggaagctgcccgtgaagccatcgactacctcgttgccaacggcgaaaaggttggtttggttgccgttcacttgtatcgtccgttctctgccaagcacttcctggctgccgtccccaagactgccaagaagattgccgtactcgaccgtacgaaggaaccgggtgctaacggcgaaccgttgtacctcgatgtaaaagactgcttctacggcacggaaaacgctccggttatcgtaggcggccgttacggtctgggttccaaggataccactcctgcacaaatcatcgcagtttacaagaacctggctatgccgatgccgaagaaccacttcactatcggtattgtggacgacgttactttcacttctcttcctcaggaagaagaaatcgcattgggcggcgaaggcatgttcgaggctaagttctacggtttgggagccgacggtacagtaggcgccaacaagaactcggttaagattatcggtgacaacaccgacaagcactgccaggcttacttctcttacgactccaagaaatcaggcggtttcacttgctctcacctgcgcttcggtgacactccgatccgttctacatatttggtaaacactccgaactttgtggcttgccacgttcaggcttacctgcacatgtacgacgtaacccgcggtctgcgcaagaacggttcattcttgctgaacaccatctgggaaggtgaagagctggctaagaacctgcctaacagagtaaagaaatactttgcacagaacaatatctccgtttactacatcaacgcaactcagattgcacaggaaatcggtttgggcaaccgtaccaacaccattctccagtctgcattcttccgtatcacaggtgtaattcctgtagaacaggctgttgagcagatgaagaaattcatcgtcaagtcttacggcaagaagggtgaagacgtagtaaacaagaactacgcagccgtagaccgtggcggcgaatacaagactctggctatcgacccggcatgggctaacctgcctgatgataccaaagctgaaaacaacgaccccgcattcatcaacgaagtggttcgtcctatcaacgcacaggacggtgacttgctgaaagtatctgcattcaagggtatcgaagacggtacttgggaacaaggtacggctaagtacgaaaaacgcggtgtagcagctttcgttcccgaatggaatcctgaaaactgtatccagtgtaacaagtgtgcttacgtttgtcctcacgcttctatccgtccgttcgtactcgacgctgaagagcagaagggtgctgagttcgctcaactgaaggcagtgggtaaggcattcgaaggcatgacattccgtatgcaggtagacgttctcgactgtctgggttgcggtaactgtgccgacatctgtccgggcaacccgaagaagggtggcaaggctcttaccatgaagcatcttgaaagccaactggctgaagctgccaactggacttactgcgtagaaaacgtgaagagcaaacaacacctggttgacatcaaggctaacgtgaagaactctcagtttgcaactccgctgttcgagttctcaggcgcttgctccggttgcggtgaaactccgtatgtgaaactgatttcccagttgttcggtgaccgcgaaatggttgccaacgctaccggatgttcttctatctattcaggttccgttccttctactccttatacaaagaacgaaaagggtcacggtcctgcttgggctaactcactgttcgaggacttctgcgaattcggtctgggtatggagctcgctaacgaaaagatgcgcgcacgtatcgtgaagactatggaagaagctatcgcagcagaaggtactccggctgaatacaaggaagtattccaggcttggattgaaaacatgtacgatgcagacaagactaaggaactggctgaaaagatcattcctatggtagaagctgccaaggacaaatgcgattgctgcaagaccatcgccggtctgtctcaatacctggttaaacgcagccagtggatcatcggtggtgacggtgcttcttacgacatcggctacggcggtctcgaccacgtaatcgccagcggcaaggacgttaacatcctcgttctggatactgaggtttactccaacacaggcggtcagtcttccaaggctactccggtaggcgctatcgccaagtttgctgccgccggtaagcgcgtacgcaagaaagacctcggtctgatggctactacttacggttatgtatatgttgctcaaatcgctatgggcgccgaccaggctcagactttgaaggctatccgcgaagcagaggcatatcccggtccgtcactcatcatcgcttacgctccgtgtatcaaccacggtttgaaggctggtatgggtaagagccaggcagaagaagagaaagccgttaagtgcggttactggcacttgtggcgttacaacccggctttggaagctgaaggcaagaatccgttcacgctggatagcaaagaaccggattggtcgggcttccaggacttcttgaagggtgaggttcgttacgcatccgtaatgaaacaatatccgcaggaagccgaagagctgttcaaggctgccgaagaaaacgctaaatggcgttacaacagctacaagcgtctgtccaaagaaaactggggcgctgaagttgccgaataatttcaagaattgaaataatacttaaatagagactgctccgcaagccggatgcagtctctattcatttataaaggaaagaatgaatatattgtgattggtttattatccggataaactaaggatgttttatcctttccgtttcagaaaatccgtggggctctcaccgaactgctccttatagcatttcgtgaaataagacggtgacgagaaacctacctcataggcaatctcggccacagtcatatcggaagcggcaagcaaggaagcggctttcttcaaacgcatccggcgcagcagttcattgggggaatagtttgtgagcgacttcagtttacggtaaagctgcacacggctcatccccatatcacgacccaaatcctcaacattcagttccggatctttcatcttctcccccaccagagtcttgaagcgggtaacgaagtccttgtcaagttcactgacagattctttctctatcgactggctatcaccgaaaaactgtttcagctgtttgtggttggctataagatttctgatgcgcgaaagcagcagttgcgaattgaaaggcttggatatgtaagaatccgctccgccgtcatagccttgaatacgctgttcgtcgagcgagcaggcagtaagcaggataaccggaatatggcaagtctgcaattcccctttcagacgacggcagcactctatcccgtccatgccaggcatcatgacatcggaaacaatcacatcaggcacgtatttcatagcaagacgaatgcctgttgccccatccgccgcatccagcacacggaattccttaacaagcaaagacttcacataatggcgaatatcggcattatcatcaatgacaagcacaatcggacaatcttcttccagagcctcatcccctgcctggatttccgcatccaccaacgtagacgaaatctctttctcatcggcagccaatgccggtacggcaggatgatactgcgatgtatcccgcttcggaagagtaacggtgaaagtagttcctttctcattactgtgcgccatgatattgccgccatgcatttccacaaaagcacgcaccagggcaagaccgataccagtaccggcctgatgtccgtctacctgatagaagcgttcaaaaatggcctctacatcagtggtagaaatatagctgcccgaattgaataccgacaaacggaaatggttgtcttccgcttcgaggcgtaccacaatctttccattctcctgcgtgtacttcaccgcattggaaagaagattgaagtagatacgttccattttcccggcatccgccagcatgcgatagtctactccggaagccggttcaaagctgaaagcgatatgcttcttaagcagagccatacgaaacgaatcattccaccctttgaagctctccagcaagtcgaacggttcaagatgcagttccatgcgtccgttctcgaccttgcggaaatcgagaatctgattgacgaggcgcagaagtatatgtacattcttcttcatcagctccagcagttgatgtggctgtccgctgatagaacggtcggcaagaagttgctccacagggtcggcaatcagggtcaacggtgtacggaaatcatgggaaacgttggtaaagaacaccagcttggcatgcgtggcagcctccagctcgcgcgacagttgttccatctggtttttctgctgttccagttggtcgcgttgctgctccaattgctctttccggcgggaaagttcacggttcagccggttctttgtacgcaaggaaagataaacggcaaccagcaatcccacaaccagcagaagtaccagcagactgccgtacagaacaacctgctgcgtggcatagcgtgccaggtatcggctgattttcccgttcagggtttcaatcttctcatcgagtgaactgatatgggcagtctgcatcttcatgatgggcgcattatcacggtccactaccgaagtgctcagaatcgtttcgcggggaaagtcccgtttattcagaatatccatcgcaatctgcatcacacggtctccgcctgtgggatagataaatgtcgcatccaattcgcccgaaagcacttgctccaccccatagccttcgccggggatggcgtctgtgccgacaaagcgcatgcccttctcccttttccggcgcatggcggctgcataggcgccggcagccatacggtcgttttgagcatagaccacatcaatttccggaaagcgggcgagcaaagtatccattctctcttccgcccgcgaacgcagccaagccccgtcttcctttgccagcagacggatgtccgggcaagcggatatgacgctcataaatccttcatggcggtctatggcaggagtagaacccgccagtcccgcaatttccaccaccgtacctttcccatgaagcatattggacacatacctgcctatcgccttgcctatttcgtaattgtccgcaccgacataagcggtgtacttttcggaaaggattctgcggtctaccacaataacgggaataccccggtcgtaggcttcttctacaaccggggttatgggttcggcttcattgggagcgactatcaataaatccactcccgcctctataaagtgccggatatcctccgcctgcctggcattatcatctttcactgtacgtatctccacttctacgccatcgtagaaaagagcttcacgcaacatctcgttattcatctggtgacgccactcgtcatcgctgcattgcgacactccgatacggaaacgtacttcatgccgggaacaggaagtcaccatgccgccgcataccgacagaacaaacagtaacaggtaaatatatcgtctcatcttctttcgctggtttaagtgattgcagatgagcaaagataagaaaaattatattctgtctttcaatatttgcggtaattccggcatcgccccgctctgcgtacatacataagcggaaacttccactgccaacttatgagcctcctgcaccggtttgccgctaagaatagccgaagtaaaggcggcggtaaacgaatcgcctgcgcctaccgtatcggcaacgggcactctcggagtttcctggaaagatacaactcccggagtaaatacatagctgccgttcgtgccgcaagtaagaataagcattttcaaattgtatttggcaagaagaatccagcacttatcctgcaagtctatacccggatagccgaatatacggctgattgtcaccagttcttcatcatttatttttaacacgttgcaacggcgcatggagtcacaaagaatctctttggtataaaatccctgacgcaggttgatatcgaatatcttcaactgttccgcaccatcgggcatggtatcgagaaaacggtttatcgtaatgcggctggcctcattgcgctgcgccaaagagccgaaacatacggcgcgcgtgttcagggccaaacgtttcaactcgtccgtaaaaggtatattgtcccatgcaaccccttcctttatttcataacaaggcacccccaccgcatcaagcgtcacctgcaccgtacctgtaggataaggtacacgctcaatctgtgtacgcaagcctttctgcgcaaaaacatccagtatttcgtcaccgtcggcatcaatgcctactgcactgactacacgactgtcaaaaccgaattgtgatacatgataggcaaagtttgccggagcaccgccgattttctttccttcgggcaggcaatcccaaagcgcctcacccattcctactacaatctgattcatggtaattaattttatagttttacatattatcatcgttaaaagaacggaaaaggtcagcgtttgattttcatcatatagaaaaacaaatacagtacccccaccgtcattacagctaccgcaccgctttgaccgatagcatcacttgccacacccatagcaagcgggaatatcgtaccgccaaacaaacccataatcatcagtccgctaacctcgttcttcttctgcggcattgccagcaacgcctgcgagaaaataatcgggaagatattcgaattgccgaaaccaatcagagcgatacacacatatatcattgtcatctcatgaaaaacgaacagccctaccattgccaccaacatacataacacactgattccgaagaaagttcgagcagacagtttctgcaaaataaaggctccgagaaagcaacctgccgtacggaaaataaaataaagacttgttgcgaatccggcatcggcaagcgacatgcccaaacgttccatcaatatcttgggtgcagtggtatttgtacctacatcgatacccacatggcacatgatgcccaagaaacaaagcagtatgaacggctttcccaacaaagcaagacattcgccgaaagtagaaggacgcccttcttccttttcctcatgaatagatgtagtgcccagccacaggatagcgacaaccgctatcaccatataaatgggaaacagcactcgccagcccatccccaacgaagggatagcctgtgtagccccccacatggctatataaggagcgaggaaagaagcgatagcctttacaaactgtccgaaagtcagcgagcttgccaaccgctcgccactgacgacattggagagcagcggattgagcgatgtctgcatcagcgcattgccgatacccaatagcgaaaacgaaatcagcatcagcgcatatccgtctccaaaaactggaagcaacaaggatgcaaaagtcacggccaaactgagaagcaccgtttttttgcgtccgatgcggttcatcagcatacccgtgggcacggagaagataaggaaccagaagaatacaagagaggggaatatatttgcctgggaatcggtcaggttcaaatcagctttcacatagttggaagcgatacctacaaggtctacaaaccccatggcgaagaagcaaagcatcatgggaagcagctttgcaagcgaattactattattgttcataagatatcgaaatttagttgttaacttttaaagtatttactgtcaggttgttgactttgcaacgccctttatctacagcaatggaaatagtagtgtaaggatgctgcggaaatacaaggtttgtcatggcaaaacgtccgtcaccctcgaaagcttcgatgctgcaacggtctataaacagacgcagacgttgcttggcttctgccggacacggagctactgttatggcaggaaagtccttattgaaatccgtaagtccgcttgcagtacggtccatgctgaatgtggagttcctcaagtcgtaagtcattacagtctgttcatccttatcattggacaacgtaatgtatactttatcggccgagcggggagccagttcgagattaatctcacagataccgctgttttcgaccggcagtttccgggataccttctttgttccggcggaaaaagcgccgtatttcaatgctttgcccgtacgcaatgcgtttacttccagtgcaggcgttgcggccagataaagttcgccgtcactgccttcgtacaattcaatgtcgcgcggcaatgtgttggcactacggaactgtttggtaggcacgttgttggcatattgccaattgctcatccaggcaataacagtatgccgcttttcgggcgtattactccaggatacggcagcataatggtcttttccgtaatccatccacttggttacttcgggcttggtatcgcaagtaaaggttttcccgtcaaaatcgcctacaaaatactgtgccgcactgcctccgaaaggaccgccgggattgatattgcaaatcagcacccatttggtacggtctgttccacgcacgggcaattccatgaggtccggacattcccatacaccctcctgcgctccatatccatgtccgaaactgctctcctttgtccagttctttaaatcgggagaggaatatatccacatttccttttccagtgcagccgccaaaacaagaatccatttgccgctcttttcgtgccagaacatattcgggtcgcggcactccttatcggcggcaatgataggatttttttcataaacatggaaagtcattccgttgtccagactgtatgcaaggctctgtatctgactggcaccggctgaagtatagatggcaatgatggcatcctttccgaaacctgccgtattatccttatcaaccacactgctaccgctgaacacagcgcccaatccgttgggttgtatggctaccggatgatgctgccagcttatcaaatccttgctggatgaatgtccccagttcatattgccccacatggagccataaggattatactgataatacagatgatattctccatctttataaaacataccgttggggtcgttcatccaaccatagacaggagtgtgatgatataacggacggaacacttcccggttggcatcatcaaacgtatcggaaagtttcaggtcgttccagcaggcatcgtccatagcatcgcgcacattcgagcgactgttaccggtatgcacgtccataaccacagccttacctcgatacggttccagtaagaacggcacaatgtagtccaccttgttcactgccaaacgcacttgaaaagacttttccaccttattattcaccaatacattaacagttgcttccggagccgtttcctccaccggcaacaaaagatatttctgtggttgttttacttgaatcaagctgtgattggcaccaaggtagtgaattttcagtccgttgctaccttgggcatgaatcattccaacagttagcattatagtagccacactaatcaatttcttcacattcatagtactgtatttttatgatattaaaattaagttatttaccctatgcacgttgcaaagataggcactcatgtatcaagtgcctatcagaattgtttcaaaatctcccaatattgaaacatgacacggattatttgtataaattattgctccacttgaaggttcggcttaaggacgttatgcacactccattctttgagtgaggcaagtttgtataccaaagtcacacctatgcataataagtgttctcgtctccatcttgtgtcgaggctatacaaatactcgcagaacccctgtaaatacagtgagcagttttctcttcaaatatcattgattttaatatttcttccacattagtagaagtcaatcttacttgcaacttaaactacataatttattcttgacaattaaaaaaataaaattaaactagcacgaactcttataatactgaagaaacagaatagaggctttatgaaaaagactattctattccagccaaataagtaatggtgtttttagttaacaattctatttgatcttgatacatgtttgcacctccattttgattccactcataagccgctaaacctatagctatgcaagtacctttgcattcatcggtgggatgaaattctaccatacctgcgcagcaccaatccgtaacgtgtccccaggtggccaatacggtagcctggttctcctgttggaaagcatcaacaggattgcctgcatcaggatagatagcaggataattgaatccattcaagtcccacatacaattgtgatcttcgcgtattccaggacctatcaaagcgaaagtaggatgtgagaaagcgtcgcaagcaggcatacctgcaaaagccggatgagtcgtatgattttgttccatgcctatgttagcatttatactccaaatatcagatcctgaactcccctctccattaccaaatatattcggattacgctccgtacgtcccaatggaacaatatactgggtggcatgattggtcagcaacagtttaccaccagcattataataagatttcagagcataaactacattttcagaaagaattacgtcaggtaactgctgccaacccacagctaaaccgactcggtcaatatgcaaccagataatttcaaactgagccaaatcggtagttgtaacttcatctggagtcagaaccacaccgttaacaaattctttcttaaaccaattatatgacgctttttcatcatcatcttcaatcatatctgcatcttcagcaactacaatgtaagcagctttggtgtaatttttttcttcttgtttataattgattttagtctcatcttcaacgcaatttagcacttctgtatcttcgcttacgtaaaacacacacgcacttgtttggttatcaatgctacagtcggcaaaacgattatttcttccttcaggtactaccacggtaataggattctgtatactggaagcccattcgcattgaatctgattactcacaaaatgatttgcatctccttttaaacgaatggcaccataatcagcctccttaccgcgtaactggtcattgtcattcagcacgagtttaaataagttttttgaaaattggttatgagaaccgtttacttccattacaccaacataagcactttccaatgtgttttctgtaacgttaattcggttacaagcatttaattgcagtgcacaatctcctccctgcagcagttggttatgagcaaagagcaaatttgtttcattagataggttacaggacgtaccgctttcacctgaagaaaaagaactatcggatatagtattctgtattccgcctaacataacaagtccgttattcactttggagactctgcagttggtaataaccatggcatctgccccatttgtttgaatgcctgtttcaaaattttcaatcgtcagattggtcaaacggattctgtcattatcatgtttcacgtgtatgcctaccccttgcctttcgttctctttacccgtaatcagcaaattctcaatttctactccgctgatacggtttcgatgcccatccacatctgctattggggcaaattgaatggcacattccatattgtttaccaggagctttgcctttttatcctgaattgaagcactatttccgttttcttctccttttagcgtaacaaaattacgggtcaacagtattggactgtccaaacggtaggtgccttccggaaagaataatacgcctccttcggcaggcatgtcttttatcaatttgttaatcaagtccgaacaatcggtgcttccatctgaagctagtccgtattgagtaacattgattattttctgatctgcacattcgccacacagtgtgtaagtatcatccgaattacaagcacttgcagcaagtacccataatcctaccgtaaatatatgattaagttttatcttcatatccattaaattttaatacattgcaacttattttcatcagcaggtttcagtcttgctgttctatttttattttgtccttaggcacacagttcaaaactttcatctgatcattaactaataaaacttgattgctattagtgttttcaatcaggcaattctctatcaagttattttttccttccgtagctctgacagttactccattttccacaatccattcacaagtcagagtattttgtatgaaatgattttcttcaccggcaatgcatacgacaccatattcagcacctcgatccaacaactgattagcaactgcatctgccatccagaaaatattattctctactttgttccgatttccactcatattcagaatacctatgtagtagcttttgaaattattattggaaatttttgcatcatcgcattcatcaagcaccagattgctgctaccgtccggatacacctgattcttttcaaaaaccaaattcttttcttttgcaaacatgcaagtaatacctttgggctgagctcctaattggcaattcttcacactgttttgttcaccgccttgcaatttgatactgctttccatctcacacacccaacaatctgatatctgcatacgggtagcttttctaatgtcgaatcctaatttcagattgatacctattacatttttgatgctacaatctgtatttgttgattcaaacaatatccctgtaccatgattctctgttccccctgaaataagtatattcttaatagccagtttactaacatctgaatttcccaatttgatagcagcatctgccttgcgaagaatcagtttgcttcctccacctggtcccaataacgattcatctttcacatcaatgttacttcggaatccaggattcagccctttgatggtcacgttgtctttatttatcacaatcggttcatccaacacaaagtctccttccggtattacaataattcctccttctgctggcagggaagcaatcatctggttgattatcgtagaacagtctgtcttcccatcacccacagctcctgccagagtgatgtcaccttctaattggtcgtgtacaccataacacaatgtctggttttcatcgttgtcgcatgcaatcatgatcagactgcacatagcgagcaaatattttcttattttcatgatattcttattttaatgtttaaaaatcaccatatccaggattctgcacataagttccttccgaaaaattatattgtgctaaaggtataggcaggtattcatctttgccagctgtaaaatgtgctcctttataataaacacggtcgttttgttctttttgtatataactattcatatagtctgcggcaacaccccaccgcaccaaatcgaagaaacgttcgccctccattgcggtttccaggcgtgcttcaaatctcacagccttgcgagcatatacttggtcccacccttgtgcaggatattccttgataaaatagtcggcagcattttgatcgggattttcaaagtctttcacataggagctgttcattgcacgacgacggatacggttgataatttctctggcttcttccagcccggaagcctcacctaattcaaccagtgcttcggctttccataacagcacatgtgcataacgaataatctgccagttcataccagatgctccccatggccagcctacaaacatgtcgctactttcgggtgacacataaaaacgcttggtacaattaaatccataatctccattgttacgtacccagctcgccttacaaggactatccggataggttttccaggtgatactcggtcgtcctgttataaagtccaaacgagggtctacggttgactcaatctgtgtcagctcttctcctgtccaaactccataattctcctcattaaaactgtcgaataatggtaaaccgttttcatcggtcttgaaagcattaatcagattttggctgggaagaaagaatccgtctccactgtaaggaccgagaggtgcattcaacagattactccagttaatattaccagctccctcagttccatcattcatggtgtattgcacggcaaataccgattcctttccgttttcataagccaacaagtctaattgttggaaatcttccaacaaatcatattgtccatccagacgattacaaagctctaccacttcacgtaacaaatctttatctatagaaacaacctgattacgttcatcctgcttataagcttgatacagcctcacttttgcggcataggcgtaagcgatgtactggttgattcttcctatttctgattgacgaggtggaagaatcttagctgcctccagcaaatccgttgctatcttatcaagtatttcctcacgagagaattggttgttaggaatatttttatatgtttcctgatctatcgtttcatccagataaggtatttgtttgaacaagcggcacaattcaaaatagaaatgcgcacgaattactttcatttcggcttttctcacagtcagttccggcatgtccgcttccgacatggtattcaaaatgcgcaatgcttcgttagcacgttgtaaacagcaatataattgataccatttgctgtcagcatttccccaagtggcatctattacaaaagtttccatctgattaatatcgccaccatcagtgatgctgctaccacctttataagcattgtctgaacgtacttcaccataggtccagttggtcatcggtacccacatcatatcccggtttgggccttgcagagctgaataagcagaagttattaaaagctcaattccttctttagaattcagtaaatcttcattcaaagctccttggggttttaaatccaaaaaactactttcattacaaccggtagtcatggcagccatcatgccggctgcaagcatatatttaagtttcatatatttcttatttaaatagttaaaaaccaacagataatccaaatgtaaaagttcgtggtagcggatagcgatatcctaatccttctgggtctgctcctgtgtaattggttaaggtaaacacattctgtgcctgtaggtacatgcgcagatttgagatgtgtagtttcttcaataccttgtcagagaatgtataccccagtgtggcggttttcagttttatatatgaaccatcttctatgaagaaatccgaatcgcgtgtttcgttattgttatctactacggtcagtgccggaatgctgcattcatatactccagtcttttcatatacttcccaggcatgcatggcttttaataaatcggtagaatggttacctgtccatccctgaaagagatctgtatagaatttggaattgttccaggcatcgcgtatcattccattaaagaaaaggcttaaatcaaatcctttccacgatgcgctcaaattcagaccagctattactttgggttggtcgctccccatccagtctcggtctgcggtgttaattttgccatctccattgagatctttgtagcggatacgtcccacaccaggttcgcccacctgtacatcgtatttactaagatattcataaacttcctccttggtgcggaagattccgtctgttttataggccatccaagaaccataagactgtccgataatagtcttgctgataccgtctccgccaccccaagtgtatttgacttcctccggcaggtcagtaatctcattgtggtaataagatacgttgaaagctacctcataattgaagtcattgattttgtcgtgccaagttatagtagcttctacgccattattgtccatactggctgcattataccatttgtatcctccttccccgatagcagcaatataaggcttttggataagcatatctttggttttctttttaaagtaatccatagtgactcctaagcggttgtccaaaaaagctgcatctataccgatattgaactgttcggtttgctcccatttcaaattattattccctgacatggtcttaatcacacctggtgataaagtttttccgtcaccggaaaaattatacgatcctgtgttcatgtctacataatacaaactgtaggtcgcgctattgtcaatcatgtcgtttccgttaatgccccatgaagcacgaagtttcaagtcgctaagccaattggaagtagtttccatgaaattttcacgtgaaattctccaaccggcagaaaccgagggaaatatggcagaattgtttccattaccaaatctggaagaagcatctctacgaagggttccagacaccaagtacttctcatcgtatgcataatttacttttccgaagtaagacaccatagcatacgaacttgaattgttactcacatcctttccgtccgtaacagcatccaaatagcgataatccaaatcctcaataatcagtccacgaccgtatccttgtacatgttcgccattttcttttttggcttccattcctatcagtgcattgatggaatgttttccaaaatcttttgcgtaattaatagtgttcgcccatacccattgcaaactattatcctctcttactgtaagttcgttagtttctacttttcggctaccttcttgccatttgggtacaaaggtggaattaaatccattggagtaattcaaaccgaatgaagattttaataccaaagctttgatgggctcgatttccaagtaagcattgccgaagatacgccagtttttatggcgattgtttgcttccatatcagttaagcggacagcattggccttatcacccaaaatatccacatatccgcctgcgtaaccgccattctcatcatacactgggatagcgggatgctgggcgatgacaagttcttcaataccttccggagtttgatgctgagtccagtaatttacagcgatactttcccccacccttactttatcatttaaaaagcggaaatttgaacttaaccgcgagttgatacgttcgtaatccgtattgcggcataaaccatcttgattcatgtaatttagggtcaatgctacattgccatccttgaaacctttggaaagtgataggttgtaattttgcataagtgccgtatcaaagatctcttttgcccaatctgtgtttcctgaacggatttttatgccatcttgatcgtaatagaattcttggagttcgggagtttcaccgttaccatatactatactattaggatgcgtaccatatgtattcttatatgcctgccaatatacctctccccattcataggcatctaacatatctatgtttgatgtaaatgtctgtgcggtcaatgacatgtcgaaatttactttcacatcgccttctttagcacgcttagtggtaatgataatcacaccgttggcggcctgagcgccatagatggctgcagaagcagcatctttcagcacttgaatggattccacatcattagaagaaagaattgtggctatattatcacgggtttgtacaccgtcaatcacataaaggggagaggaattgttgatggtagtaacaccgcgaagcagtgtactggtgttccctcctcccggagtaccatctgtagtgatattcatacctgcaacccttccttgtaatcctgtaagaatatttcctgttggaatgtctgccacatctttcattttgactacagcaaccgacccggtcagactagctttcttttcagacatataacctgtcactaccacttcattcaacatttgtgaatcttccatcatctcgatacgaacggtgggttgtgcttttaccgttacagcttgaaaaccgatataagaaacagataattcggaaccctgtgaaacggtcagtgagaaattaccgtcaatgtctgtaatggttccgttattttcggagcctacttctattacggaagctccaatgacagaaagacctgtggatttctccactactgtaccttttacagagatctgttgtgcatgcaacgtaatccctataaacagtgccactaatatagtgcacgtcttaaaacagatgtttttcatcatacataatattttaaagttaaaattatatttagatacgaatcttagccatacagcttctgattttctccgtggcaaatataaaaccaacataaatattttatcataacatttgttgcaaaagatataatgaatgatacatcgcagaagagcattagcgcataaacaactataatacaataacataacagtaaatcagaaaaaaaataaaactattttttaatatgtccttaactcaagtttcacaaatatgtgaaacgaattgagtaagaagtcatcagcgaaaacaaaaataaactttatccatcagcgaaattaaattagcatataaaattgatttcaacaagtctgctttgggtaacgaagccacgttttgacacggatagcatggtaatgatagattaaaactaaagtaagagaattttcatactctccaactcataaattataagttagactgttcctgttttgacctttttcttttggataaatcgccttatagaagaaataacgaacaaagagacatcaaccatataatttatcagccaaaagcgcaatgccattatccgccactatcaccccattccaatatagtatgtacaatagataaccgtacttcgaacaattttatccttttctgttcttaaaattcactatctttgacacccaaagaaaactataaaaaacataccatgaagaaattaattgtagctaccttgttattaggcagtggcacattactgtctgcacaaaaaactgcaaaaataccggcatactataaaccggcaaaaagcgaaatgtaccataaaggctggatagacttcaacaaaaacggtatcaaagatatatatgaagaccctgccgcaacactcgatgcccgcattgaaaacctcttgcagcagatgacactcgaagaaaaaacctgccagatggttaccctctacggctacaaacgcgtactgaaagatgctcttcccacccccgaatggaaacagatgctctggaaagacggtatcggagccattgacgaacatctgaacggcttccagcaatggggattgccaccctcggacaatgaaaacgtctggcctgcctcgcgtcatgcctgggcactgaacgaaatacaacgcttctttgttgaagatacccgcctcggaatccccgtggatttcactaatgagggcatccgtggcgtggaaagttataaagccaccaatttccccacccaactgggattaggacacacgtggaaccgcgaacttatccgccaagtaggacttatcaccggacgggaagcccgcatgctgggctataccaacgtctacgcccccatcctcgatgtaggccgcgaccagcgttggggacgctatgaggaagtctacggcgaatccccctatcttgttgccgagctgggtatcgaaatggtacgcggactgcaacataatcaccaagtagccgccactgccaaacactttgctgcatacagcaacaataagggagcacgtgaaggcatggcgcgcgttgatccgcaaatgccgccgcgcgaagtggaaaacatacacatctaccctttcaaacgggtaatccgtgaagcagggctattgggcgtgatgagttcctataacgactacgacggcattcccatccagggaagctattattggctgactacccgactccgcaaggaaatgggtttccggggatatgtggtatcggacagcgatgccgtagaatatctctataccaagcataacaccgccaaagacatgaaagaagccgtacgccaaagcgtggaagcaggcctcaacgtacgttgtacattccgctcgcccgactcattcgtacttccgctacgcgaactcgtaaaggaaggcggactgagtgaagaagttatcaatgaccgtgtgcgtgacatccttcgggtaaagttccttatcggtctgttcgatgctccctatcaaacagaccttgccggagctgacgatgaagtggagaaggaagccaatgaagccgttgccctacaggcatcccgcgaatccatcgtattgctgaaaaatacagataatacactgccgctgaatatcgataagataaagaagattgccgtctgtggtccgaatgccgatgaagaaggttatgctctgacacattacggaccactcgccgtagaggttactactgtcctcgaaggaatccgcgagaaagcacagggtaaggccgaagtgctttataccaaaggttgcaaccttgtagatgcccattggcctgaaagcgaaatcatggaatacccgcttacccctgacgaacaaaccgaaatagaccgtgccgcagccaatgcccgtcaggctgatgtagcagtagtagtactgggtggtggccaacgtacctgcggtgagaacaaatcgcgcacaagcctggaattaccgggacaccagttgaaattgctgcaagccgtacaagccacgggcaagcctgttatactgatattgattaacggtcgtccgctatccgtaaactgggcggacaagtttgtccctgccattcttgaagcctggtatccgggctctaaaggcggtacggcagtagccgacattctcttcggcgattacaatcccggaggcaaactgacagttacttttcctaaaacagtaggacaaatcccgttcaacttcccctacaaaccggcttcacagatagacggcggtaaaaatccgggaccggacggcaatatgtcacgcattaatggtgcactgtatcctttcggctacggtttgagctatactacttttgagtattccgacctcgaaatcactcccaaagtaatcacacccaaccaaaaagccactgtacgactgaaagtaacgaataccggcaaacgtgccggtgacgaagtggtacaactctacacgcgcgatattctaagcagtgtcaccacctacgaaaagaatcttgccggttttgaacgtatccacctgaagccgggagagagcaaagaaatagttttcactcttgaccgcaagcatcttgaattgttgaatgccgatatgaaatggacagtggaaccgggcgagttcgccatcatggcgggtgcgtcctccgaagacatccggctgaatggtatacttactgtagaagattaccaagctcgcctgcaagcacttgaaagtcaaaatcccgtcagtcccgtaacagcaagtaccgatatggaaaacgccccaaatgtgcttgataaacaaaagaatacggtctggcagggtaacaaaggagattatataacctttgccctaaagaacggaagcaaaataaacgaagttgctatcgctttcaagcgagacaacggacttccggcagagttcgagatacagctttcaggcggaggcggtcagttccttactgtctattcgggtactgtcagccaatacggcgaacttatctcctatccgttcaaaggaaccacggccagtgacttgcgcatcttactgaatgatgaccgtgtaggaatagctgaagttgtactgaaagaataaggacatgcagcattcctattttatggtctgactgaaagttaatctttcgtaaatgaatatccaagaacaaagaacttcgttaactttgttatttaaaattcatagttataaaccgatagagaaatatgaagaaaaaaatgatatgggtggccggcattctaatagctacaagtgcctatgcccaaacagatgtcagcaccggtattatgcgcggtaaagactacggagtaacttatctcctgcctaaaaccgaaatagaaattgtagtacaggctaccaaacatacatacatgcccggagagttctgtaaatatgccgaccgctacttacgcatgaacaatgtatctgccgatccgaatatctattggaccatcgacaaagtacaaacacacgtggcgggagtacccgataaagataatgtatacttcgttaagttgaaagataagactgtagccccactaatggaacttaccgaagacggcattgtccgttccatcaacataccgcttaacagccatacgataccggcaaccaaaataaccgctgccgcacaagaaatcatagatccgcgtaaattccttacggaagaaatactcatggcaagttccagagctaaaatggcggagttggtagccaaggaaatctataacatccgtgaaagcaaaaatgcccttctccgtggtgaagccgacaatatgccgcaggatggcgcccaactcaaaatcatgctcgacaacctcaacttacaggaacgtgctatgacggagatgttctccggaaccttgaaagaagaacctcagacgtttacaatccgcctgactcccaaagaaatgaacaatgaagtagctttccgcttctccaaacgattgggcatagtggcaaacgatgatttggcaggcgaaccgtattatatctccataaccgatttgaagactcccgccattccggaagaagacagtaagaaaaaagtagacggagttgcttacaacgttccgggacgcgcccatgttatattaacaggcaacaacaagaagatattcgatggtgaactgcccgttacacaatttggtactatagaatatcttgcacctgtactattcaataaaaattctactataaaagttttgttcgatacagctaccggtggattaatcaaggtagacagagaaagcaattaggaaattgagagtcgagagttgaaagcaggtctgcattgtaataccagatggtaactttcaactctcgactttcaactgaatgaatccatctttctgcaactgcataatgtaagtagtgacacgagaaggatagttatcttcattttggaaatggtcggtaagcagagagattatctcttgtacggttcggtttccatctatcaaacgccatacggcagtaccgtgttcttccagcttcacatgaatatcggccgacatactcttcggcaacaaaaaacgtctcatccagtcgtacttaaaccgaggaaaggaaagtatcgcgtactccccttcccattcggttgtaatatgtccgcactgaacgggaacagtatccaataggtttacttttccttttgtatctgacattaccgttatcaagctttgatattaggttcttccaaaccaagacctttcttcttgtcaacaactttaagaataaatcccagtaccaaagcagcaacgccaagacaagccagcattacaagcggtgcggtgtaatcatacgaaacggcagcctcttccggagtaatcacaccgttctttaaatcagcaacaagctgcgtattggttttatcaagtacctttccgattagaagcgggaagagccaaagaccaatattctgcacccagaaaataagcgcgtaagcactgcctataatcttggcatcaaccaatttaggaacactgggccataaagaagcaggaaccagtgaaaaacttgcaccaagtaccaatatagtaagataagctatcacaacaccacctaccgcattatctctgaactcaggaagaacaaacgcgaaagtaagatggcaaagaaccagtaacatggaacctatcatcagcatcgaagctgccttacctttatggtcaacatagttgccaagtatcggtgttatacctacagcaagcaaagggaagactgcaaatactgtttcggcactctgacgcatataacccatataacagaagacagtgagcaatactccggcaagggtaagcaagccatacttcatacttgccttcttcataaaattacttgcaaaagaagcacccgcaacgacaagcataatgcagtactgaagaattgtcaccgtattagtagcccagaaagagtcggtgggtacttccttgaataccaaattacattgcagcatatttacggcatatttctggaacgggaatatagcagaataataaagtacacaaagaagcgctaccaaccagaatccgccactggacaaaatagtaccgagatcgctgatcttgaacggatcgtctttctcctcagcctcacccgtctgctcgtcaagtttcttatccatgaagaagtagacaataaacataataagtgcgataagcaatagcacaacaccaaatgccactgaacgggaaacatcaataacaccccctaatttagcaaataccggagagaaaatcatgcaagtggcaactcccaaacgggcaagcgccatttcagaccccatagcaagcgccatttcacggcctttgaaccacttaacgataccgcgagacaccgtaatacccgccatctcgacaccgcaaccgaaaatcatgaaacctattgccgcaaatttagctgatgccggcatacctctatagaatggagagatacccaactcatcgaaaccgggaatataattcaggttgttggtaaaccaagtttgaagtccacttccctgaaaagcgtctgtcaccgcataccaattgatggtagctccgacaagcatcacagcaccggaaagaattgcagtaaaacgtacacccattttatcgaggataatacctgcgaaaataaggaaaaatacgaatacattaaggaatgtctcagacccctgcattgtaccgaatgctgtagaatcccagccacgcgtggactgcatcaagtctttaataggtgaaagtatgtccataaaaatatatgaacagaacatagcaaatgctaaaagcagcaataccaaccaacgcatacctgccgaatcgcgtagcgtctggtgaattttgtcagtagttgtcattataatattataatatggtttataatttcaaatgaatcttatctggctacaaaaataaccaaatataaaagactataaataaaaacaggcagaattgtacaacataaattgtacaactccacctgtcaagaaattacagttatttctcaaaattaatttccagccggttctgcagcatccgtagcagcaggagctgttgttgcaggagctgcttcagccggttgctcagctttcggagcagctgtacctacgggcatattgtacgggttcgtcttctcttcttgctgtgcctgttccaaaatcacatcaccgcctttgtgagaagcagaagggataacgtaagcggaagcaacactcatcaccaccaaaaacacagcgagactccatgttgccttttccagaaagtcagtagtcttgcgtacacccatgatttgattggatgatgagaaacccgaagccagaccaccgcctttggaattctgaatcaacacaatgaaacacatcaatatggatgcgatcaccattaagataactaataataaatacattttgttattttgatttagcgttaataatcaatttctccaaaaatctgatttggtctgcaaagtaagcatttttttttggataattcaaacttaattttttaataatttcaagtgctttatcatatctgtgctgtttaatatagattttagccaaagtttctgtaaaacagctatcatccacatcttcctgacgaatctgtccatcatcattttcatcgtcttcggaagtagaatattcgttttttgaaagggaagcggagaaagtctctttttgctcggaaatcacttccttatcttcaagagatgcctccttttcttccggagatacgagaactttctcaggacataccgatctttcaaatacagatgattccgacgactcgctcttacgtataaatccatctatcagttcgtgtccgcgcagtttagggacttccttcccaccggttggttcagaatcattctgtccgtcatcctgcaacagataagttgtgtaatccattgcataatccaattctgtaacctgcgaatgctcttcgggaactgttgccagaaaagcatctatcaaagagagtgtacggtctacattaggttcttcttccggcactttggaagaaagtaaaggtgacttttgtgatttcaacctatagcggtcaccttctatcaaataaaacaatacacgtctgtctgccacatacagaacagccttacgcagctctgctccgaatgtgacatcgtgcagcaaatatagattcttaagatacagcagccgaagcgactgaaaatagggataacggaccagcagagtacgaagctcgtacaaagtatccttgttcaacatttcaggatgctgtatccattgttgcaaataggcagaagtcattcctcaattaccagttagctacggttgaattaaatatttgttctgtgatatcctttatcattttacttatcagatcatcctgcacatcagtcagcagcaaggaggaatcataagtctggaaagcggaaaactgttgttcaaaatcttcctcatgattggtattgtttacataacgcacgtttacggtcatagtcagcttcactttagaagaatagccatcagctgctacagcttcattgtattggttataacccgttatctcaccgtctatttccagatcgccgttggcattcaccaattgcaaacgtgtttgctggataaacatatccttaagtttctggttaaactccgtagtcatgggagcatacacgtactcggcacgattaggaaattcggcaattgtaatagtcttcactttgctgtaatcaatagaacttatcggagcaagtcccatagagatgcggcaggaaactaccacgcacaccaaacctgctaacgccgatatcaacgttattttcttaatccaatccatattcttttatctttctgtatagcgtacgctccgatatattcaaatctttagccgcacttttgcgctttccgtgatgcttttcaagtgccttgcgtatcatttctttttccacttcatccaatgagagagattcttcaacatactcttccgtgtcttgaatatcctcatctacttcctgagctgatttcacggaagggtgtattatagtaggcactccggcagcaggtactgaagctactaccgctggagcagatgcataataagcagtaggtgtcgcaccctgatttcccatagttgcccgttcggtcataatttcgtgtaccagttttttcaattcggtgacatcctggcgcatgtcaaaaagcacctgatacagtatttcgcgttcgctttcaaaacttttactttcattctttacaccaaacaaggcaggcaggcgctgcacattgctctgttcgggcaggtaattcttcaaaatagaagcgttgatttcacgattggtttcaataatggaaatctgttccgttatattcttcaactgacgcacattaccgggccatggatatgtcagcagcacttgtttggcatcatcagtcagctgaatggcaggcatacgatacttttcggcaaagtctgatgcaaacttgcggaacagtaacacaacatcctctccacgttcgcgtaaagccggcaccggaataggcaccgtattaagacggtagtataaatcttcgcggaaacgcccgtcagcaattgcttgtgtaagattcacattggtagcagcaacaatacgtacattcgttttttcaactttagacgaaccgactttaataaactcacctgtctcaagcacccgaagcaaacgagcttgtgtaggcataggaagctcccccacctcatcaagaaaaatggtaccgccgtcagcctcgccaaaataccctttacgttcaccgatagcaccggtaaaagcgcctttttcatggccgaacagttccgaatcaatcgttccttcggggatagccccgcagtttacagcgatatattgtccgtgctttctgcggctgtattgatggataatctgcggaaaactctccttacccacaccactctctccggtaatcagcaccgacaaatcagtaggagctacctgaatggcgatatcaatagcacgcatcaatgcctcgttattgccaataataccaaaacgcagttttacttgttgtatttctgctttcgtcatactacaaatcctcttctgtactatcaagtttcagcttatcgctgtcatcacgtctttcgtaatattgtttcctcaggggattggcatgtgcttcctgctcgcgcatacggttacggaacacatcgattgccacatagacagcctgccggaaagaatcttcggaagcgatcccttttcctgcaatatcataagccgtgccatgcgccggtgaagtacgcactaccggaagaccggccgtatagtttacaccttcatccatagccaaagatttaaaaggagcaagtccctgatcgtgatacattgccagtataccgtcaaaatgagtaaagttaccggaacccataaagccatcagccggataaggaccataacacaatatgcctttccccgccagttctttaatggcagggatgattacttcctgctcttccgtacccaataagccttcatcaccggcatgtggattcagggaaagtacagcaatacgcggtgctccgataccaaagtcctgcttcaacgcacggttaaaaacgagcagtttctcctgtatcaactctttcgttatagccgatgctatctcccgtacaggaatgtgtcctgtcactaatgccacccgtaaatcatctttcatcagaatcatcaaagcttttccgccatcacccaacttctcttcgagatactccgtatgtccgggaaaagagaattcttccgactgaatagtgtgcttattgataggagccgtaacaataacatcaatcagccccgctttgtattcttcaattgccttctccaaagcgccaagagcagctttaccagcctccggatcaggtttggaaaactcaacttttacttcatcgtccgtacagttcacgacactcagacgattagggacagcttccgatgccgagttcacaatactgaaattagtcggcaagtccaatgacttgcggtgataagcagctactttgggtgaaccgtaaataatcggggtacataactccaacatcatcggatccgaaaatgttttcaaaatcacttcatacccaactccgtttatgtctccctgagttataccgactcttattttattatcttccatccttatttttctgttttagtagaatctttttttgttactgccaaaggcatctcatttccttcctgtttgcttccgggcaatttaagcgtatacaatgacgcttccatctgacgtaccagattacgtttcatcttatcgggtgaatacacaaatatctcggatacgataatgcgctgattaactttatccaaacggacatgagatacatacggaccacccataaaatcgcctttcacacgccacaagccacgagcttccaatgcatattcgtcctgtacattgataggacgtacgtctgtcatcaatgaatcggtttccatatacataccctcccttgcaccaggaatattaatcttcatcacagagtcacgcttatgcacgaaatactctttcgtaaatgtatccttgtcggtataaggataggaatagataacaaaattttgatcacctgtagcagcattcgtacctgcccaaaagaagttttctccctgcttagtcgccgtcagttcacccggaacccatacgtcacaatcgaacatactctttactttcgtagaaacatagtcactgtgtttgttttccagcactgcaatctggcggttcatttcagcacgggtaaagaaatccacaattacttgcctgttctcctcgacaaacttctcaaaagaggcttcatccggtgcctgaatagtcaggatagattgaggtgcagcatatacattcttcgcatatttgaacttaggctgtgtatacagatctttgttcacctcaacaatgataatattgcggatcaacttcaatgtagagtcatagtttgccggagaagtatacataatacggaatgaacgttccgactggggaagcccaggtacgtcagaatcaagtacatcatagagagcacgaccggcaggacgctcccacaacccttggtcaatcactaccaaaatttcatacgcccgaccactggatgtcggagtaaacacacccttcttgccattaccacatgctgaaaacaatgcagttatcagggccatactcaaataaaacaggtgtttcttcatacatttatatgttttagttattacaaaactacgaaaaaggcgtataagcttggcgtcaaagttaataatttatattaattcttctttattctcttcctgtttagcagtcgaaagcataccgcatgcggcaaatatatcctcaccgcgcgaagcacgaatcgtagtaaacagtccatgcgatgtcagataatcacggaatgctgtcattgtctccatatcagcaccttccagattaactcccggaatagcatgaaaacgaatcaaattgatacggcagtccagcccccgcaataatttcaacaactccttggcatacaacaaagaatcattcactcctttaaaaacaatatactcgaaagatagtctgcgctgtttactaaaatcatagtttcttaacaaatctacaatctcagtaatggaaaaagccttttcggcaggcatcagttcacgtcgttgcaaaggcacgggcgagtgcaggctgactgccaaatgacagtctgattcttcaatgaaacgctgcaaccccttacgaagcccgacagaagagagtgtaatccgcttcggactccaaccgtatccataggatgatgtcattacttccagcgccttcaaaacttcatcaaggttatccaacggttctcccatacccatcatcaccacattggtcagtttatcccgttcgggcaaagaatttatctgattaataatctgattagcggtcagattggcggtgaaaccctgcttacctgtcatacagaacttacagttcatcttacatcccacctgggaagatacacacaacgtagccctatcttcatccggaatgtaaacggcttcaacataatgtccctctccggcacggtaaagatacttcacggtaccgtctaccgaccgcatggcatccactggtacttcacatcctacttcgtatatctctttcaacagagcccgatgtcttaacgacaagtttgtcatttcgtctatggaagctactttcttgtcatatagccacgcagcaatctgcttggccgcaaatcctggcagccccagattctttacgaccgtctgaagctcggttaatgtaaggcctaaaagaggttgtttcattctaactgtatatttacgataaaagatagtttatttactgataaattatcctttgcaaaggtaggaataaagttgcacaaatgaaaaaagccgttcgacatttatcgaacggcttccccaagtatataaaattattctacttttatattattagaaatacagataacggctatctttcacattggcattcaagtataaatcattcatgaactgatttgctatacgtgcatgcataccttccaatgtagcttcttccgtttcctggttataagtttcattcagtttttccttagcataaggttgaagaacaaatacaccaccattacccttgataggtgcgctcaacttgtttaattcagcaattgaagcatatgcccctaccaaaggttcgctactacgcaatgccgggacataggccggagcagcgaaagtaacatgctttacggagtcactcactgcatttgccatattcttatattggtcaaaagtcgttgcaccggcagctttcatatcagccatgattttctctgctttcttatcacgaagaatttcgcttctcaactgttcttgtaccatagacaacggacggtaaccttcaggaatgatattcgtaacagccaccaccatcatatggtcactttcgccacattcatacagacctgaaacctcacctgcttttgctgcaaatgcccatctcaaagcttctttcgtacctttcacacctccgatagcgtgctccgaactgtacaagtcagttctatccagcagtctgtaccctgcatcttctgcattggcaaccaatttgtccaaagtattgttagctgcaatgaactgactgaagtcattgtatgccttgctataagtttccttgctgaattcaaccggacgcttgataacggctactttatatttatctttcacagcttttttattcatcacttgcaagataacgtttgcctgtcccaaagcgaggttagccaactcattctgacccaaagtagtgatggctgcaatatacttcaaattatcaccgtccacctgagcaccttcatagttggcagaagaaatccatgttgcctcacctgtctgaccgtacttcttggcaatttcggcaaagtctgcaccgcctttaatggctgtgtagatactgtcagccaaagtcttggtcttggcagcatcttctgcaaccacttgaatctgacgatattgaatggagtcaggcatagcagcagaggccagtttcttgaaagaattgattgtattgtccgatgcattatagtaaggaccatatacaccacctacctttacagaatccaaacgggcaacaacgtcagcaggcagcgccttgtctgtatagaataagtcaacatattgctgagtagaaccggttgagcgaatgaagtttgaataatcggaaggattctcagccaactgcacagtatattcctccacttctttctgaatatcggctttgtcttccggacttgcagtaacctgcacatcaatatacttgatgttacgggtttccacatattgtctgaattgctcttttttcttgttataagcatctttcagttcggattccttaataacaattgtagaatctacaatagaggaataaggaacggctgccaacaacaagtcagactggtctacacgtgcattgaaagcatcttccgcttcaacaggattagagaacagagacttcgtaatcaaagcctgatatttctcctgcaaacgagcctgtataagtgacttctccacaaaactccaaaagttatacatggaattgtaatactccacatattgagccggcatctgagccttgttcatcttagagtaatccaccaagaatttcttcaacatatctttgtcgaaagcaccggtctgcgggttacggaacggagtctgctgcaacatcggatgtacaccggcatcaatgatagcctggagttccgctttagaaacagtcaaacccaacttttcagcttcgttctcaatcagtttattgtttacgtatgctctccagacttcatccttaatctgattggtttgttcatcgctcaacgcgttcaagccgctggagaatttcactacttccgtatattcctctaccaatgcctgaaaatcctgagcggaaattgtttccccgttcacttctcctacatcttgtgactggtgcggctgaagtactttccacgcgtctcccgcgatgaaggcaaacagcgccagaccaataacaatcaccaataagggccctttagaccgaatgttttgtaatgttgccattttagttaatatgaattatttgtttattattattttctattcaatgttctttttagcgcacgaagatacaaaaaatgctaatacgcatctatttattctttaaaaatttacgctgaaacgaaattattccgtgactttcaaccgtaccaattctattttagtggctgtcaccttaattatcttaaactgatatttgtcaacggctatcacttcatgcagtttcgggaaactttgataacggttcagaatcagtccgcctatcgtaagatattcatccgattcgggcagttcaagattgaacgtttcatttaccttctctatttcaagacgtgcggacagcacatattcatgttcgccaatttgtttacagatgtaggaagtgttgtcgtgctcgtcctcaatatccccgaatatttcttcaaccaaatcttccagtgaaacaataccggatgtacctccaaattcatctaccacaacagcaattgtttttttctgttgcataaaaagtttcatcaatttatgtgccgccatcgtttcgggcacaatgggtacttccttgacattatttctccagtccgccggatttctgaacatttcagacgaatgaatatagccgattacgttatctatattcccatcgtacacaataattttggagatacccgactccacaaacacgttcttcaagtcttcgagcgaggccgtcacatccactgccaccacttccgtacggggaacaatacaatcgcgtatttttatattagagaaatcaagcgcattctgaaagattttcacttccgcatccaactcttcctcattagcagcattctctatacccgactgcacgaaataatccaaatcgactttgccgaatgccttatcggacgcttccttatttatcctcatgccaaataagcgcaaaaagagataagacagcccggaagcaaactttgatatgggaaacagaataacatagcagacaaacaaaggtgtagcaaataccctcaataccagattcgggttaatcttgaacagcgtcttcggaagaaactcgcccgttacaagaataacaagagtggatatgatagtctgcaccagcaccattacaaaatgattatcaatcatacccgccagcagattcacctcgataatctgtgccataaggataccataaataaccagcgcgatattatttcccaccagcatggtggaaataaaattattcggattgcggaagaaacaagaaaggatgcttgacgtaatacccggtttccgctccatctcaaaacggagtttgtccacggaaacaaaagcaatctccatccccgaaaaaaaagcggagaaagccatggttatcaataagtaaattatagtgctcatcatattatttgatgctgtctgttttcaacgtatcagaaggggtgacactgtcctcatccacataaaagataccttccgtcttgaagaaacggtattttgtcaattgctcatttgattcaaaaccaatggcataaattatctggtcgggttgttctatacgcacccgctgatcggaatagacacgctttttattctgatcccaatacagcaactccgtatcgaatttttctcctttcaggttctgtatgtgtacatttcctatcagcttccacaattctttcttattatagtaataagctgtatcggccttgatactggcttcagtatggaacaaagaatcgaatttttccagatatatacctttttcaaacgcccaataaggtggtttcttacggtcgtaaatcaaccactccgccgtattgacccgataacgggtaatacccgaatcggaaatcagcgttgttacccctttagtatccataaccggcaacgaatcacgttcggtaatggcagctcccatctcttttttacgtccggaacaggaagaaaataaaagaagcataaccatcaccctcagggcaatggttatgctcatatttttatgtccgacaacgttaggttgtagcgacatattcttatctaatggttgtagactcaccgatccagccaccaatcgtaatacggtcaccggctttgtaacccaacataaagaggtcttttgcctgcggagtatgacgtgcataggttgcaatcagttcattaaccttatctgtaacactcggatctacggctttagcacgttgaagtttatcaataactacgtagtaagtacatctgttcaatgcaggctcatcactccagttgggatttgaaccgtacatttgagccagcagaatatagggttcgccatagttttcattaaagctgattgctttctgggcataagttcttgcctgagacagtttcttagcctgccacaaagctgcagcggtagcataagccatttcagatttctttgcattatcggtttccatgcccaatgcttcatcgaaatacttcaccgcagtgtcataatcaccttttttatagtacatatatgctacacctacagctgcatcagcagtcggattaacacgatacaaataatcggaagctttgaagtatgcctcacattcattacacttcatcatcttcagaatagtgatggtcttcttcaggaaagcagagtctgccttattttcttcaactttcggaccgtagatattctgcaatgattcacaatcagctacaccgctgttaacgaacatagctaccaaattatccttaattgtttgcaaaacagcttttttctttgcattatcctctgctgcaatagcatcatcggcgtattgcgaagcattgatataatcctggaagaattgatctgtatgattagtatctgcctttactttctgcatggacacatcaacaaaatagtgcaatacagcaccatcagactcacccttagcggtttctgctgattctttcagccaggcataagcctgattcaaatcaggagcaggtgcatattgcagataatccacagcttttgtgcctaatgcagacgcaacactcggtacacccttcatctttgaagcaaattcaggaatatacttcattttctgatcatgcacagccatcagttcatcaaacaatttcttatactctgctgaattacgatccttaatctgactcatcaaacctgtaagaatcttctgtgcatcggtataagtgtaatatctcagtgtcggacaatctttcagaactgccatacaaggagcgtaagcatccttgaagtttttcgctcttactgcctcatgcgagatactactattggcattacaatcactttgtgcgaaagtgctggttactccacccgaaaggagcaaaacagcgacaagcgttttaattttcattgtatttaaattttagttgttatattgtctattttcaccattcagcattaatcaactttccgcttgaagaaccagcgttcattgaaagttactccaacacagatacgcaacgtattttcattcaggaatgcggctgtcttgccttcggttcttacatactgggccgaaaggcttaacacagaacgcgtacgcggaatgggaagtccgaaaccggcagttaccccatattcgtcagcggcacgcataccgtttattttataataaggttgggaatagtaagctcccaaacgatattttacatgtgccaagtagctccttcccatagggtttggaagaaattcagcgcctacagcaatcttggtacggttacagaaagcatttttctcattcatataagtaactgaactccatttttgaaaagtaaagtcagcccctaccgtcaaacgcttgtcatacacatagctgaaaccaacacccaaactcatcggactaccgaaagcggcaaccgtatctctgttattcacagtagttcccgttttctcatttcccaatctatcctctacatatgaatcgttgttcaaatcatgtcccggcgagaatactatacctaatgtagcttcatgtttctttccgaatacctgcgtatactgtgctccgatatccaacttatagctttgtatagatgtacctgttatcgtagtcagcggcaaagtagacgaatttcccggaaatgttatggctcttgtgtgcgttatatctccccaaaaatatgagatattagcaccgacagaaagatttttcaagactttaaaccctgctcccaaatatagctgatgtaatccgccatctccataatattgcaacgcgctggattgggaaggataatccgtatcttccttgtattccgccatgctataccctacattcgagtaaggcaacaatcccagactcatagcagcccatttacccaaacgaaattgcattgtaatatagtcaaaactggagtttttggcattttgctttatcgtaccgttactgaagttcgtattttgcagggaaataccgccgtcaaaaataaaagtaagcgaatcgatcgccgtataggatgccggattagcgaaattcacctgatatttatcccgtaatccgtatgcaataccacccatggctttgctattacctgaaccctggtccgccaattgtccgtatccgtatcgtgtatagggagaattcgtattattttgagcgattgccgctccggacaacatcataagcaagaacaccaagagtgtttgtctatatcctatcattattatagtttaaaattctatttaatcctttcaatactaaaaatctgtctgcaaagatgatactttttaagtttgtatcaaaagaaaaatcatcgccgcccgttaaaaaaaccaaaagttcaggatatttatgtttcatcgccgttatgtaacccgaaatttcatattccatacctttcagcactccttcgcgcattgccgtatcggtatcgctgcccaacggcaggcgccgtccctcccgaagcaccagcggaagccttcctgtgaactcatggagcgccctaaagcgcatctgcacgcccggcgaaatatttccgccatgataacgtccggcggcatctataaattcataagtaatgcaagtcccggcatctataaccagaatatccttaccgggaaactgttcgtatgcgcccaccacagccgccatccggtcatatcccaaggtttcgggcgtttcgtaaagattctccaccggaagcaatgttttttcatttagccacaacaatgaaacgggcaaacttttcagttgtgccaacacccgttcattcaaatcgataacggtagccacgattgccttctcgacagcatatttcgcacatatatccgacagacattcaagcgtttgattagaatcatagagtatttctacaatatccttatctttaaacaccgctatctttgcaacggtattacctatatcaataataagattcattctgcatatatttaaagcggcgcaaagatagcacttttttcctttgttccacatgcataaaagaaaaaggttctcctatgacaattgctgttttaagatttaaagtctatctttgtaacgaattacaaaatacactcttgattaaatcaatgataataaaaaagacaaatgaagttatctccatcggttttccgttcacttatttttcttttcttcagcctgtccgtcgtcactatgcaggcacaagaaccaaaaagagttattccggactctatacatatcaatctgttgacatgtgcctcgggagaagaaatatattcccttttcggacatacggccatacggtacgaaaactatacccgcggcattgacgcagtattcaattacggcatattcaacttcaatgctcccaacttcatccttcgttttgccttgggtgaaacggactaccaattgggagtaaccgattatgaacgctttgctgcagaatattattacctggaacgcgatgtttggcaacaagagctgaatctcactgtacaagagaaagaaaagttggttatgttacttgaagagaattaccgccccgaaaaccggatatatcgttataacttcttttacgataactgtgccacacgtccgcgcgatttaatagaaaaatccattaacggcacgctgcaatacgcaggcgacatgacagacactgattccggcatttctttccgagacctgctgcacaaatacagcaaggggcatccctggtcgcgtttcggcatggacttatgtatgggcagccaagccgacaaaaccatcaaccgcagactgatgatgtttgtacctttctatgtacaagagtacttcaaccaagcccgcattgtaaacaaagaaggagaaacacgccctttggtactgaatgaagagaaaataatagtaaccggcaacgaagaagcggaacagccttccgatggcttcacccctatgcagaccgccctgctccttcttatactgaccgcagccgccaccatctacggcatacgccggaagaaaacgctttggggaatcgatttcgcgctattctttgccgccggaacggcgggatgtatattggcgttccttgccttgttctcccaacatcctgccgtcagtcccaattatctgctgtttgtgttccatccgcttcatcttttctgcctgccttgtatgctgaacagagtgcgaaaaaggaaaagaagccgttatatgctggcgaactttattgttttaacactttttatattgctttggctcgtaataccgcaaagatttccgttagcagtgttacctttggcactttgtttgctgatacgttctgcaagcaacctaattctcacatacgataagaaataatgaagaaaggactgataacttccatactcgcactgacattcggtagcctgcaagcccagccactgccgccatctccgaaactggtggtgacgttgacaatagaccaactgcgtacagactacatggaagcattctcgtcattgtatggagaaaagggggttaaacggctgttaagggaagggaaagtattccgccaggctgactattctttcaatgtcgccgaccgcgcttctgccattgccgctctctacacaggtaccacaccgtccatgaacggcatcatagccgaacgttggtttgaccccaaaaccctgcgtccgaagaattgtgtagacgactccgctttcatgggtaactataccgaccagaacaccgcccctacccaactgttgacttccacttttgccgacgaacttaaaatagccactaaaaacgccgcactggtatatgccattgccccctttcgcgatgctgccgtcctttcggccggacatagcggtaacggcgcattctggctgaatcatcaaaccggcaaatggtgcggcacaacctattacggcgagtatccctggtggctgagccaatacaacgacgggcaatcacccgacttccgcatcaaggagatggagtggaatcctcttcaccccatcacaagctatacattcctgcccgaatggcgcaccatccctttcaagtataggtttgaaacagaaaaagacaacaagtaccgccggttgataaccagcccgctcatcaacgatgaagtgaaccgtgtgacagaggatttgctggataaaagcaatatcggcaaggacgacatcactgatttgcttgcaattacctattatgcaggcaactacaatcaccgcagcacgcaagagtgtgccatggaaatgcaagacacctacgcccgcttagaccaaagcatcgcccgcttgctggatatgctggaaagcaaagtaggcctgcaaaacgtactgttatgcatcgcgtccacaggatatgccgacccggacggagcagacataggcatctaccgtattcccggaggagaattccatctgaaccgttgcgccactttgctgaacatgtatctgatggctacttacggtgaaggacaatatgtagaaggcttttataatcaacagatatatctcaatcataaattaatagaggagaagcagttgaatcttgccgaaatacaacaaaagtcggcagaatttctggtgcagttcagcggagttaacaaagtatattccgcctaccaattactgctgggttcctgggctccgcagatggagcacatacgcaacgggttccaccgccaccgctccggcgacttgattatcgaagtcttgccgggctggaccgttatgcaggaaaacagcaatgacaaccgcgtagtacgcgctgccaccatagccactcccctcattcttcttggcaaaggaataaagccggaaattatccgcatgccggttgccatagaccgcgttgctcccaccctatcgagtgcgatgcgcatccgcgcccccaatgcgtgcacagccgcaccgctcaattaaggaacaaactccgcattctccgtggcaagtccttaaaataatcagtgcaactttacattatctattgcaaaatcagtaactttgcacgccatataaactttagtaaataataataaaaacaaatacataatgggatttaatgaatttttaagctcgattttcggaaataaggctacccgtgacatgaaggaaataaagccgtgggtagacaaagtaaaagccgcttatccggaaatagccgcattggacaatgatgccctgcgtgccaaaaccgaagaactgaaggcatacatccgtaactcggcagcggaacaacgctccaaagtggaagaactgaaagcaagcgttgaaaacacggaactggaagaacgcgaagaactctttgctcaaatagacaaactggaaaaagagatattggatatttacgaaaaagcattggacgaggtgctgcccgccgctttttccatcgtaaaggaaaccgccaagcgtttttccgaaaatgaagaaatcacggtaaccgctacggagttcgaccgccatctggctgctaccaaagatttcgtacgtattgaaggcgataaggccatctaccagaaccactgggtagccggtggcaatgatacggtatggaacatggtacactacgacgtacagttgttcggcggtgtggtactgcacaaaggcaagattgcggaaatggcaaccggtgaaggtaagactttggtggctaccctgcccgtattcctcaatgcactgaccggaaacggcgtacacgtggtaaccgtgaacgactatctggcaaagcgtgactccgaatggatgggtcctctttatatgttccacggtttgagcgtggattgcatcgacaagcaccagcccaactccgacgcacgccgccaggcttatctcgcagatatcaccttcggtacgaacaacgaattcggtttcgactatctgcgcgacaacatggctatcagcccgaaagacctggtacaacgccagcacaattacgccatcgtcgatgaagtggactccgtattgattgacgacgcccgtactccgctgattatctccggtccggtacccaaaggcgacgaccagctcttcgagcaactccgtccgcaggtagaacgcctggtagaagcacagaagaaacttgccacgcaataccttgccgacgccaaacgcctgatagcttcaaacgacaagaaagaacaggaagaaggattccttgccctgtaccgcagccacaagtgcttgccgaagaacaaggcattgattaagttcctcagcgagcagggtatcaaagccggtatgctcaaaaccgaggaaatctacatggagcagaacaacaagcgtatgcacgaggttaccgacccgctgtatttcgtaatcgatgaaaagttgaacagcgtagacctcaccgacaagggtgtagacttaattagcggtaactccgccgaccctacgttcttcgtacttcccgacatcaccgcccagctctccgaactggaaaatgaaaaagacctgacggatgaggaacgccttgccaagaaagacgcccttatgaccaacttcgccatcaagagcgagcgtgtacataccatcaaccaactgttgaaagcttacaccatgttcgagaaagacgacgaatacgtggttatcgacggtcaggtgaagattgtggacgaacagaccggacgtatcatggaaggccgccgctactccgacggcttgcatcaggccatcgaagccaaagaaggcgtgaaagtggaagccgccacacagacctttgcaacgattacgctgcaaaattacttccgtatgtatcacaagctgtccggtatgaccggtactgccgaaacggaagcaggcgaactttgggacatctacaaactagatgtagtcgttatcccgaccaaccgccccattgcccgcaacgatatgaacgaccgcgtttacaagaccaaacgcgaaaaatataaagccgttatcgaagagattgagaaaatggtggcagccggacgtcctgtcctggtgggtactacttccgttgaaatctccgaaatgctgagcaagatgctgactatgcgccatatcgagcacagcgtactgaatgcgaagctgcaccagaaggaagccgacatcgtagccaaagccggtttgagttgcgccgtaaccattgccactaatatggcgggtcgtggtacggacatcaagctgagcccggaagtaaaagctgcgggcggtcttgccattatcggtacggagcgtcacgaatcgcgccgtgtagaccgccagttgcgtggtcgtgccggacgtcagggtgaccccggttcatccgtattcttcgtctctttggaagacgacctgatgcgtctgttctcttccgaccgtattgccggcgttatggacaagctcggtttcaaggaaggcgaaatgattgagcacagcatgatttccaagtctatcgaacgtgcacagaagaaagtggaagaaaacaacttcggtatccgtaaacgcctgctggaatacgacgatgtgatgaacaaacagcgtaccgtagtctacaccaaacgccgccacgctttgatgggcgaacgtatcggtatggacattgtgaacatgatttgggaccgttgtgtcaatgcgatcgaagctcctacctatgaggactgcaagatggatcttctccagacacttgccatggaaactccgttcacggaagaggagttccgcaacgagaaaaaggagaaacttgccgataaggctttcgatgctgccatggaacttttcaaacgcaaaaccgaacgtatggcacaaatcgcttatccggttatcaagcaggtatacgagaatcaaggacacatgtacgaaaacatcctgattcccattacagacggcaagcgcatgtataacatctcctgcaacctgaaagccgcttatgaaagcgaatgcaaggaagtagtgaaagcgtttgagaagtctatcctgctgcatgtcatcgatgaagcatggaaagagaacctgcgcgaactggatgacttgaaacactccgtacagaatgccagctacgaacagaaagacccgctgttaatttacaagctggagtctgtaaacctgttcgatacaatggtagacaagataaacaatcagacagtttccatactgatgcgcggacaaatcccggtacaggaaccgcaggaagttcgtcaggcagctcccgaacaacgtcaggatttaagcaagtatcgcgagcaaaagcaagacctgaccgacccgaaccagcaagccgccgcccagcaagatacgcgcgaacagcagaaacgcgaacctatccgcgtagaaaagacggtgggacgtaacgacccttgtccgtgcggaagcggtaagaagtacaagaactgtcacggaaagaacgcgtaaaataacgattagtggttagagattagcgattaagggttcattgagtaccaatcttaatcactaaccactaatcgctaatcactataataagagcctcgaacggttaaaaactgttcgaggcttttatttattcaagtaaaagattacttttgtttttcagaactaagaataaaagactatgactaaatactcttattacctgttactgtcttgtttgatgtttttggcgggttgccaaaccgtcgaaccgcttgccatagattatatgttaccggcggatgtaagtttcccaccgagtttgaaacgggtagccattgtcaataacatgcctgaagttccggacaacaagcctattcttgccaaagagaagaaaaaagacgattttgagatagccagcagaacagattattacaacggcaatgccgccattgccacggaatcccttgccgaagcccttgcccacgagaactacttcaacgaagtggttatctgcgattcggccttacgtgcccacgatgtcactccccgcgaaggagcgctgtcacaagaagaaacaaaccggttggtgcatgacttggacgtagatttcctcatcgcattggaaaacgtacagatacgctctgtccgcaaaataaagtacatgcgcgactggggcatttattacggcacggtagatgcccggatatatcctactgtcaggatttacctgcccaaccgcagtacccctatggctacaatcaatgctaacgacagcattttctgggaagaaaccggaaacggtccctttgtacaaggcaacctcatcagtgaagaaaaactgataaaacaagcttctgattttgccggaaccataccggtaaaaaaactgctgccatattggaaaaccgccaaccgctatctgttctgcggcggttccgtaaacatgcgcgatgccgctgtatatgcccgggacaagcaatggaacacagccatcgggctatggaagcaaacctacgccacccaaaaaggaaagaaaaagatgcaggcagcctataaccttgctgtcggctatgaaatgcaggacagtattgccgccgctctcgactgggcgttgaaagcgcaagccgaagcacgtatcatagacggcgtggataaaaaagatttgactcaccttggcaaagcggatatcccctactacgtccttacaacactttacgccaccgaattaaaggaacggaaagaaggcttatcgcgcctaaatatgcaaatgcagcgatttaataatgatttttagtcaaatactgtaaatgtaattgttttttttatacctttgaacatccattaagtaaagaaaagcaattatgaaactcagtcaaccggcattatctcttctcgaagaaactatcaaacaggcaatcggcaagtacgcttgcggttgtgagcagacagtcgttacggatatccatctgcaagccaaccaaagttcgggcgaattttccatattcgacgatgatgacaaagaactcgccagtaccaccatagaagaatggatgacatacgaaggcgatgatttctacgaaaacatggaacgcatcctgagcaatctgctctgcaacctcaagaaccggggtgcttttgacaaactgaccatcatgaagcctttctctttcgtattggtagatgacgacaaggaaaccatagccgaactcttgttgctggacgatgacaccctgctggtaaacgaagagctgctgaagggattggatgaggagttggatgctttcctaaaagacttactggagaaataacgaatcatatacggatcgtacaacgtacataaaaaaggtccggactttattgagtccggacctttcttttatatcggagatactgtcttacgctttcttcaaagcggcaatactttctctcagtgagctgatgatactctccgcgtccgcctgtttctttcgttccatttcgataacggcagcaggagcattattcacgaacttctcgttgctcagtttcttcagaacgccttgcaggaagccttccttatgcttcaattcagcttccatacgggctatttcggcttccacatcaatcatgttgcccaaaggaacggcaaattccgttgtacctaccatgaaagcggcagcgccgtcggccttagcctcaactgcggttacggcagaaaggttgcacatcttgataatgacagcatcgaaagcagccaccgggttttcaccgacaacctgtaattccaacggttctttttgggcgatgttcttctgcaaacggatagaacgtacattactgataacctctttcaccacctcgaactgctgtacaaaagcctcatccacttccgtcgacatggagatagggcttaccataaggctttctccatccttacggtcgacgatgtgctgccacaactcttcggtgatgaacggcatgaacgggtgcagcagatgcaacagattatcgaagaaaccgatagtcgtatcgtacaccttcttgttgatgggctgtccgtaaacaggcttaatcatctccagataccaggaagagaactcatcccagaagagcttgtataccgccatcaatgcttcgctcaaacgatacttgccgaacaggtctgccaattcggcagccacggcattctgtttggactcgaaccagcgcatagccagttcggcagcttccggcacaggcacttcctcactcacttcccagcccttaaccagacggaaagcattccatatcttattgttgaagttacgtccctgttcgcaaagtgcatcgtcaaaaaggatgtcgttgccggcaggagccgaaagcatcatacccatacgcacaccatcggcgccgtagcggtctatcaggtcaagcgggtcgggtgaattgccgagcgatttggacatcttgcgtcccagcttgtcgcggacaatacccgtgaagtaaacgttcttgaacggcatcttgccttcgtattcataccctgccataatcatgcgcgccacccagaagaagataatatccggccccgttaccaggtcgctggtaggataataatagttgatttcttcgttgcccggattcaggataccgtcgaacagggagataggccacaaccaggaagagaaccaggtgtcgagacaatcctcgtcctgacgcaaatcctctattttaagggcaggatttccggtcttttcctgtgccagcttcaaggcttcttcgggagtggctgccaccacatatccgccttccggcaggaagtaagcaggaatgcggtgtccccaccacaactggcggctgatacaccaatccttgatgttctccagccagttcttataggtatttttatatttggcagggtagaatttcaagtcatcattcatcaccgggggcagagccatatcggcaaagtgctgcatcttgaggaaccactgcatggagagcttcggctcgattgccacgttggtacgttcggagaaaccgaccttattggtataggcttccaccttttccagcaacccggcaccctgcaggtctttctcaatctgctcgcgtacatcgaagcggtccattcctacgtacagtccggctgcttcgctcagcgtaccgttgtcgttgaagatgtcgatggcaggcaggttgtatttctcgcccagcatatagtcgttgacgtcgtgtgcaggagttaccttcagacagcccgtaccgaactccacgtctacataatcatcctggataacaggaataacgcggttcaccagcggcacaatcactttcttgcccttcagccattggttcttcgggtcggcagggttgatacacatcgccgtatcacccatgattgtttcgggacgcgtagtggctaccacggcataacgcttgccggaagcgtcgcgatgaactacttcgccttcggctcccgtctcaccggacatgtcatcgtcggcaacgtaatatttcagataatacagcttgctgtgctcttccttatagataacctcttcgtcgctgagggcggtgagggctttcgggtcccagttcaccatacgcacaccgcgataaatcagccccttgttgtaaaggtctacaaacactttaatcacgctttcactgcgtttctcatccatggtgaaggcagtgcggtcccaatcgcaggaagcgcccagcttacggagctgtttcaggatgatgccaccgtgctcgtccgtccattcccaggcatgcttcaggaattcgtcgcgggtaaggtctgttttcttgatgccctgtgcggcaagtttgttcacaaccttggcttcggtggcaatggaagcatggtccgtacccggaacccagcaggcgttcttgccttccatacgggcacggcgtacaaggatatcttggatggtattattaagcatgtgtcccatgtggagcacaccggtgacgttagggggcggaatgacgatggtgtagggctcacgaccatcgggtttagaactgaataatttgtggtctaaccaatactggtaccactttccctctacgtcagcgggattgtacttacttgctaattccatgtttctaaaatctatattttgttataatgggcgcaaaattaataaattaatagctttatccggcaaaagcaatgaaaagaattacatacctttgctttacaaatgatgattttatacggagttgccgtaacaagcacccggtgccgcttcggcttcggctaccgaaaccggaagtttccacgcaaggaaacaggagtatacacgcagggaaacgacagtgtctacgtaaggaaacagcagtttccacgcaagggaacagcagtttccacgtaaggaaaccggagtatccaccgcttgaaactcccgttcccacagggagaaacaacagcaccgaaggcaggaaaccggcacgggccccaaaaagaagaatagaatgaagcgtagcataacaatagcaggagtgagattcagaggcaattcattacttttgatattttttttgttgctcgtattgtgcgtgcagacagtgcccggcttgggagatgcctacgccatgtacgtatacccgtccatcgcccgggcactttcgtccttctcccggcttgtgcctttcgccatcggcgacctgttcattgcgctaagtatcgccggcgtacttctctaccctgtttacgcacgctgcatccgcaaacagaaatggaaccgtatcctgcagaaagatgtaaagtatcttctatgggtgtacgtatggttctatctggcatggggactgaattactcgcaaaaaaacttttacgagcggacgcgcattccttacacagcctatactcctgataactttcggagttttacagacagctatatcgagaatctgaacagctcttacaccgatattacgtcggtcgaaaaagagctggtctgccgtgaaagcgtacgggtctataatcaaatcggtgactccttaggcgttcaccgcccctttcatcaaacgccccgcgcaaagacgatgctattcaccccactgatttccatggtaggcgtcaccggcagcatgggacctttcttctgcgagttcaccctgaacggcgacttgctcccctcgcaatatccggctacttacgcccacgagtttgcccacttattgggtatcaccagcgaggcggaagccaacttctacgcctatcaggtatgtacacgctcgcaagtgcaggccatccgcttcagcggttacctctccgtactgccgcatgtcctgaacaacgcccgccggctcatgactgaagaggaatacgcgcagctcttccggcgcatacgtccggagattatcggactggcaaagaagaacagcgagtactggatgaagaaatacaatcctgtaatcggccgcattcaggaccggatatacgacttatacctgaaaggaaacaagatagaaagcgggcggaaaaactactcggaagtggtaggcctactgatttcgtatgaggaatggaagaaaaacagtatctttgcgtcaataatgtttaattaaaaaaataactcatgcaacatacaagaaaggaacagatggaagccttcggccgcttcctcgacatactcgacgaactgcgtgtgaaatgtccctgggacaagaagcagaccaacgaaagcctgcgtcccaataccattgaagagacttatgaactatgcgatgccctgatgcgcgacgataagcaggatatctgcaaagaactgggagacgtgctgctccacgtggctttctatgccaagataggttcggaaaccggcgatttcgacataaaggatgtatgcgaccgcttatgtgagaagcttatcttccgccatccccacgtattcggtgatgtgaaagcggagactgccggacaggtatcagaaaactgggaacagttgaaactcaaggaaaaagggggcaacaaaacggtgttgagcggtgtgcccgccgccctgccctcgctcatcaaggcataccgcattcaggacaaagcccgcaacgtgggtttcgactgggaagaacgggaacaggtgtgggataaagtaaaagaagaaatcggagaattccaagccgaagtggcccgcatggacaagcagaaagcagaagaggaattcggtgacgtaatgttcagccttatcaatgccgcacgcctgtataaaataaatccggacaatgcactggagcataccaaccagaagtttatccgccgcttcaactatgtggaagcacatagcatcaaggaaggcagaaacctgcacgacatgacgctggaagaaatggataaattatgggaagaagccaaagcattagaaaagaaaggaaactgaaattcacttactatctgtttcttttcaggcgcggaattacacggatttattttatctttttccgtgaaatccatgtaattccgtgcctgaaagaaatcatcaagtgtatttgaacactctccttttaaatattaaagttacaacctgtaacttttcagaacagtcattttagttttgacgcacccgcacaattttcaattcgggcatatatcctttttcatttcttgcccggctggggtttcggcgctttatctttgttgtcattatgccgcatccctttcagcaattcccggtgaaaacgcatctcggctttctgcaccagataaagtttcttggcagacaatatcttcttgaacttcgcaaaataagtcttgtccaaacggtcggcagcgatacgggcatcgtacacgccttccataatcacatcatattgggcttcggtggtcttttcgtcctttccctgacgaatcagactccacgccttgtcattctgctcttttttcttgtcctgcaattcaaaataaagaggaaagaacctggctgcctcttccttggtcaatccggctttttctgtgatatatgctttttgtctggcacggaactcagcaggcgacaaacgttggttgcatccgtccgctgcccgcaatacgggtgccagactgcacatcattactaataaaacaatcagctttttcatttcttttttcaatcggttaaagttctctacggcttattcggcatcggaatcggccagatatacatacaatgagtagtcgtcaagcatggagttatccaccgccatgttgatatattccatttcggtttccgtttcgtcggcagccatgcggtcggttgcagccggcgtacggtcagaggaagccacgcggataatcaatgccgcacctacaaacatagctgccatataggcccagggtttcaccctctcccacatcgtaggctctttctgttcgaaggcaagtttctccttttcgggcagacggttcatcagctccgaagtgaaattctcaaaatatccttcgggaacacggaaagcattctccgtccctactttcttgagtatgttgtcttcttctttcataagctcttctcctttctgtttggttagactttttttcacgttaaaggtttaatcttcttctcccaatatcttctctattttttttacggcatggtggtaggacgctttcaaagcccccaccgaagtaccgaaaatatcggacatctgctcgtatttcatttcctggtagtacttcaggttgaacaccatgcgttgcttttcgggcaaggtgagcaacgctttctgcaaggccatctgagctttgtcgcccgaaaagtaaggatcgctctccagcttctgaagggtgtcggcttcgggagcgtccaacgacacggtgctcgccgcccgctgtttgttcaggaaagtaaggcattcgttcagggcgatgcggtagagccaggtggagagtttggcctctgcccggaaataatcgatattgagccatgccttgacgaaggtattctgaagcaagtcgttggcatcctcatgagaaagcaccatgcgccggatttgccagtataactgctcgctgtattgcgccacaatcatctcaaatccccgcttctgcgtactttcttcctgaagaagcgccagcacttcgcgttcgttataagaagggttcatatagtctattcacatttatatcttttctctacgcaaagatagaaaattaaaaacgaaaagccatccgcaagaggcaaaaagcccggcaggcacaaaagcatattgccgattcgtttgtttaatgctcctctttgacttggcggcagatacattctgccagatggtcgttgacaaagcctgctgcctgcaaatgcgcgtagcaaatcgtactcccgaagaacttgaatccccgttttttcatgtccttgctcatggcatcggattggggcgatgatacaggaatatcgctcaataagtgaacggtattcacgataggcttcccgtcggggaagaatgaaagggtgtagttataaaagctgccgaactccttctgcacggcaaggaacagccttgcgttcgtaatggtcgatttgattttcagacggttccgcacaataccttcaaactgcatcagacgctcaacgtcctcatcggtcatttgcgccacttgtccggcatcgaagttgcaaaaggctttacggtatccctcgcgctttttgaggattgtgatccagctcagtccggcttgggaactctccaatacaagaaactcaaacagcgtcctgtcatcggtcaccaatcttccccactcctcatcgtggtacttcacatacagttcatccgttccgcaccagccgcaacgtccgtttattatatcttgcatacttataatatttatacgtcagcaaagatagcaaaattccgattcacaccgatatgcaaagcgtttctttggccaactgcgtatccggaaagacagcgcgcgcctcatccagcagtacctgttcatcgtcataacgggcggagaaatgacctatcagcagcttcttcacttccgcatcgcgggctatccgtgcggcttgcgaagcggtagtatggaacgtttctttggcacgcggggcggcatcttcggcaaaagtggcctcatggaaaagcaaatccactccttttatctgttccgttatggaaggaagataaatcgtatccgaacaataggcataacgccgcggggcagccgagggacgggtgagacgggcattgggtatcacctctccttccggcgtaacgtaatccgcaccgttcttgatacggttcagctcgtacaccggcacttgatagaagtctatcatgtcgcgcaggatatgattggggcgcggcttctcggcaaacagaaaaccgcagcaaggcatgcgatgccgcaaaggaatggttgtcaccgtaagcgaccgatcttcataaatcaaggcggcttctttcgtctcgaacgcgtggaagaagattttataggtcatctgataattgaagaatgcaagcatcggcgtaagaagttcttccaaacctttgggagaatggatatgcaagtcggccgtacgccccaagagattaagcgtggatatcagtcccagcagcccgaagcagtggtcgccatgcaggtgggagatgaagatacggttcaaacgcgagaatttgaggcgtgactttcggaattgcaactgtgcgccttctccacagtctatcataaaaagtttgtcacgtaagttcactacctgcgaagtaggaaaatggcgggtggtgggcaatgccgaaccagagccgagaatatgtagttcgaatttctccatgatggtgcaaagataagggtaatcatcacagattgcacagattattgccaagaaattaagagcctgcccaaaaagaaagggcacttgtgtttgccacaagcacccttaccttatttatatggagaagtaattacttctttccggcttccatttgctctttcaaagcagccagagcgtcgatgtcgcccaaagttgtagaagcagcctggttttggatagaagcaggagcttcttctctcttaccggaagacttcttggcagctttcttttctgctctttcttcagccttggctacatcttcgaagatgcggctgtgagacaggataatacgcttagcgtccttgttgaactcgataactttgaattcgagcttctcgtccaactgagcctgtgagccgtcttccttaacgaggtgtttcggagtagcaaaaccttctacaccataaggcagagcaacaactgcacccttgtccagcatttcaatgatagtaccttcgtgtacggaacctacagtgaatacagtttcaaatacatcccaaggattctcttcgagttgcttgtgaccgaggctcaaacgacggttttccttgtcgatttccaatacctgtacatcgatgtccgcaccgatttgagtgaattctgaaggatgtttaaccttcttagtccaagacaggtcagagatgtgaatcaagccgtcaacaccctcttcgatttctacgaatacaccgaagttagtgaagttgcgaacttttgcagtgtgcttggaaccgataggatatttttcttcgatagtttcccaaggatcagctttcagctgcttgataccgagagacatcttacgttcttcgcggtccagagtcagaactacagcctcaacttcatcacctaccttcatgaagtcctgtgcagaacgcaagtgttgtgaccaagacatttcggatacgtgaatcagaccttcaacacccggagcgatttcgatgaatgcaccgtagtcggccataacgacaactttacctttcacgtggtcgcctaccttcaagttaggatcgagagcatcccaaggatgcggagtcagctgcttcaagccgagagcgatacgcttcttctcatcatcgaagtcgaggataacgacgttgagcttctggtcgagttcaaccacttctttcggatcgctgacgcggccccaagagaggtctgtaatgtgaatcaaaccgtctacgccacccaggtcgatgaatacaccgtaggatgtgatattcttaacggtaccttcgagaacttgtcctttttcgagtttaccgatgatttctttcttctgttgttccagttcagcctcgataagagccttgtgagatacaacgacattcttgaattcctgattgattttaacaaccttgaattccatagtcttgccaacgaatacatcgtagtcgcggataggcttaacgtcgatttgagaacccggcaagaatgcttcgataccgaatacgtcgacaatcataccacccttagtgcggcacttgatgtaacccttgataatttcttcattttccaaagcagcgttaacgcgatcccaagaacgggtagcacgagctttgcggtgagacagaaccagctgtcccttcttgtcttcctggttttcgatgtacacttctaccgtatcacctactttcaggtcgggattgtagcggaattcattcaaaggaatgataccgtctgatttgtaaccgatgttcacaactacttcacgcttgttcattgcgattacggttccgtcaactacctcgcggtcgttaactttgttcagcgtgttgtcatacgccttttccaagtcttcgtgacttacgtttgttacggtttcaccgttttcgtaagcatcccagttgaagtcctcaatgggagcaacattttttaaattttccattaataaataaattgtttaactcgttaattaagtgagactttatgttgactcatattaaatcgggcgcaaagataggagtattttcttgaatgacaaaaagttctttctgaaaatatccggtctttatgcccgatttctaaagatttacaccttattatatggtagaattctccctgacatatgccaaagccgcccctatggccgtgcggtattccgcatagggcgggatatggaaacgcacatgataaatgctttccatcttcggaaacacttcccggcattgcggcaactgggtaagattacctatcagcacaaagtcctttaccggactgttcagggcggaaagcacagccgcaccgccgatagtctggagcacggtataaatgatgccgcaggcaatgtcttccggtgaggcgttactgtcggcctttccgaacaatgaagcggtagcggatacgggcaggtcgggcaatgcgttgttacagatatcgccgatttgcagattgacgcgggtcacatcgccttttgccgccaaaccggcaacctgatgaatgtcgtgtgttttgagcaacagccgcgaaagtccctgtaaggttccgccaccgatacccataccgccgatatgctgtatttcatccccgttgattcttacaaaggaggtgcctgttcccatgctgacaactatcagccggtcgatgtccgtggcatggcgcgccccgagtccgttggctatgaactcatccgtcttgcgggtgggaagtccgtaaagcgggctgtccacaaacgcactgcccacaccggtcagcatcacctgctccacatcggacaaatggattccgttatcatagatatacttgccgaacgctccgaacagggaagttaccggatcggctgccgttatgaacatcggagactgtatcttgcctttattgagtcctacgattttagtagtgcttccacctacgtctatgcctattacaattcccatagtcttaaaattttggcacaaagataaagtataaattcttataatatgcctttcggacctacctattgaacaactcaaacgtaaacttaacccctacttcctggtacttccagtttgcaaagcttgtaaaaacgccgaaatcgaagatgtgcgtaccgatgccatacccaagctcaagataaggattcaggtggggaaccaccagagcgttcagatacaaccgttcattcaatacgtattgagtatatttcttcaagtggcggagcagcaggaaaggagcctcgtacgtaaaatgcccgcggatgtacttacgggacgagttataccaacgcccgtcgagcaactggaacactccgccgatttcatcattccagcctacgggaagattggaacgggccagattggcgaaatccacaaaataaagctctttctgattcgtaaaagcaccccagccgaagcggtagtaaatgtcacgcatcaatcccaacgggatgttgtgctggaagtccacttcaatacgttcgtactttccggtgctatgcatgacaccgctgataccgcgctcccagtctacggaaacggtgggatatttggaatgaaggttgattttacggtcgccgctcatataataatactgaccgggagtccacgtcaggcgtacacggggtgcaaagctgttataactgtggcggaactttttcagaaccgaagggtcgaatcccggatagacggatgacacacccgcagacatcacattcggagcatcggggtagacaagaacgaatttagaacgctccacttctgtacgcctgtgcaaggaaagccccacatccagagtcagaccgttaacaatctcccagctgtggcgtatgtgcaaatacaagtccttaaaatagtccaggtgaatctggtcgaaatcaaagatactgtcgggaatagctttcaaatcgtccagcacatcgctgctgtagatacggttaccgttacccacgctgacatgcagggcggcacgcttgcggggccaatagtcgaaatcggaattgaccgaccagtaaaactccttccgtttgaagttgtaacctaacttgggaacgatacgcaacagacggtcgcccttaaacaaccggttgtatttaaattcctgacggtaagagaaaccgttgctcttgctgtagctcagcaacaaagggtttataagaggcgaacagcgcacactccccattttggcaaggtctaccgtatacttgcttaccagcgcatcgcctatctgcccccagaactccagccgcttgttcttgggctttttcttatagagaagcgtgtcacggcgcaagaagaagtcctcatacagcttcttctcatgcgaagtcagcggaataggacgcagcttattgaagtgggcggtatcacgccggtaagcattggtatccgtcagcagagtataagattccgacaggtcgtatttgctttttgtcctgttccgcacaacagccgggtctttctgactaatctccttatagtcgagtaccgccgtatagctgccgtcgatgacattgcccagcaaacgaaatgtggcatcgatgttgaaatgcacaggcaaaaactcattagcgctccccacctgtcccattcttaccagattattaaaacgcagcatctcggaacgcccggaaaaacgaatctcgcgcacactccacacattgtcgctgaccaccatgtatccccccacgagctgaaaactcttgctcttcggcataaaacggatacggaactcacggttgtgcgcttcacccattatggaatctatataataggtatagaatttctttgcattggaagccagcggggagagcagcttatcatacagcaaggtggaagagtagatattgatgtggaagtattcaagcaaacggccgtccagttcccaaagttcggaagaagtgcccacactggctttcactttctggtcgtaaatatcgggagcggtataatgcagttcgctgtatgtctccatcatatactcccggacccctttcttcatacggaacatggaagggataaagcggagcagatgatttttcttgcggatgtttgcccagccttttatataaagttccgccttgtactcatcgacaacgcgctcgtaaaaaggcgcaaagaagataaccttgtccataatggaatccgcataagcccgttgtcccgcatacgattggggaacagccgtagcacccgccttctgcaaacttgcacacaagaaacagattcctatccatatacatataatatgtttcaaccgcaatatcttcttatgagggaacaaagttactacaaaaaagtgaaatgcggaaagatatagtgatagaattgagttacaagggttttggttgaagtggcgataatccgtgaagccattacaatccctgccgaagccaaatcctgacgccgctacgttacttgttcgtaaccatgcccgaaaatgcgacaaacgggtacgaatagcgaaacaaggctctaaggaatagtgagttatccataactcatgcgaaaaatcaggttacggaaaaagattgcgccgttcctccccgttttgcgtaccaacaccggactcttcaccaactaattttgaaacccaaaaattaaggacaatgaagagtacattttcagtaatctactacctcaagcgtcaggtagtgaaaaaggacgggacagttcccgtcatgggacgcatcacggtggacggcagccagacacagttcagctgcaaactgactgtcgatccgaaactgtgggacaccaaaggtggacgtgtcacgggcagaagcacggcggcactcgaaacgaaccgtatgcttgacaagatgcgggtacgcatcaacaggcattatcaggaaatcatggagcgtgacaacttcgtcacggcggagaaggtgaagaacgcctttctcggactggaacaccgctaccacacgctgatgcaggtgttccgccagcacaacgaggactacgagaagcaggtggaggcaggcatgaaagccaaaggcacgctgctgaagtaccgcaccgtttacaagcacatgcaagagttcctcgacatccgctaccatgtgaaggacatcgccctaaaagagcttaccccggctttcatctccgacttcgagatgttcctgcgcacggacaagcactgctgcaccaataccgtgtggctgtacgtctgcccgttacggacgatggtattcatcgccatcaacaacgagtggctgacgcgcgacccgttccgcgagtatgaaatcaagaaggaggaaacaacacgcagtttcctgaccaaagatgagatccgcctgctgatggaggggaaactgaaaaacgccaaacaggaattgtaccacgacctctacctgttctgcgccttcacggggctgtcgttcgcggatatgcgcaaccttacggaagagaatatccgcacctacttcgacgaacacgagtggataaacatcaaccgccagaaaacgggcgtggtgtccaacatccgcctgctcgacatcgccaaccgcataatcggcaaataccggggactgtgcggggacggcaggatatttcccgttccgcattataacacgtgccttgccggtatccgtgccgtcgccaagcgttgcggcatcaccaagcatatcacgtggcatcagagccgccacacggcagccacgacgatattcctctccaacggtgttcccatcgaaacggtcagctccatgctcggacacaagagcataaagacgacgcagatttacgcaaagataaccaaagagaagctcaatcaggacatggagaaccttgccgcaagattgaacggcgtcgaggaatttgcaggttgcaccatctaaaaagaaaagccatgaaacgtgacacaatcatcatcgaggacaaggcagtcagcgtaaccggtaacgacgtgtggatgaccgccaccgaaatagccggattgttccatacgaccgtcccggcagtgaacgccgccatcagagccgtccgcaagtcggacgtgctgaacgactacgaggtgtgccgctacatgcagcttgaaaacgggctgcacgcggacgtgtacgcccttgaaatcatcatcccggtcgctttcagggtgaatacctacaacacccacctgttccgcacatggctggtgggaaaggcactctcacaagagaaacggcagacatacgtgatgttcatacagaacggaaaagccgggtattgctgattgcacataccccataagacaagtaaacgggtagcaccacaaaaggtgtcacccgtttactttttcatgaaaccgcctcactccagcggcttgcggtagttcgcttccagtaccccgcgcagccccgtttccgggtaaagcaccttccctcccaaaagtatgaagggcaacacgcggttgttgcggtattcctgcaaggtgcgccggctcacacggagcagttccgacacctcgccgtccgtcaggtaacgttccccgtccagcggaggacggtagctttccagaaatgcggacagccatttcgagcctttgcgcatatcctgcaccacagaggctatcggctcgtcttccatcgtaaaaacatcgttgttctcgttcatcataacttcggattcagtgggtgaataaatcaaatcatctgccgtgcggatagagcgtgccgacaagcggtatcagccgcttcacctcctctggcttgtaatagaacctgcggtttatctgcgagtagccgataagccgcctgtcacgcagcgtctgcaacgtgcgcgggcttattctcaactgcccgcagacctcctcgcccgtgagccatctttccatgcgccccgtgtcgcttttgcgcctcagggcggcgaccttctccgagagtgcgccgaatgccgccaccatcatctcgaaagtctttttctcgatagatactatttccatattcatgtcatttagagtttgccgcaaaggtaacgaaacggcatacaagacgtatcgttttccgctgaaaggctgcctgttgcgccgtttgaccgggttacggagccatcttccgcaaaaatcttacgtgagtcacgtagtgagttgttaaagccccttttgtttattgccgaattttgtcgcagaaacaaaaagaaaggactgaacatgaaagtgataacaatggaaagttccgcctacaaggagatgatggcgcagattgcgaacatcgcagggtacatccgcgaggcaagggacgagaagaaacggaagcgggaaaccgaagacaagctgcttgacacggcacaggcggcgaagatgctcaacgtgagcaagcgcaccatgcagcgtatgcgcaccgaccaccgtatcgagtatgtggtggtacgcggaagctgccgctaccgcctttccgagatactgcggctattggaggacaacacagtaaggaacgaggaagggacaatagacaccctgttccacaaccacacgctgcgcacgggcggcaaaccaaaaggaaggaggacataggtcatggaactgctcacacgaaacaacttcgagggctggatgcagaagctgatggaacggctcgaccgtcaggacgaactgctgctggcgatgaaggctgaggggaaacagcccactatcacggaaagcatccgccttttcgacaatcaggatttgtgcatgttgctccagataagcaaacgcaccctccaacgctaccgcagcgtaggcgcattgccctacaagacgctgggcaagaagacctattacagcgaggaggacgtgctgacattcctttccaaccatatcaaggacttcaaaaaggaagatatagccttctacaaggctcgtatccataatttctttcataaataacccattaaaacatttttcagatggcaaagaaaaaagacgaaaaggacgtgctggtagtccgtgacgagaagacaggcgagatcagcgtggtagccgggctgaacgcggacggcacacccaagcgcacccccgcaaaagcggagaacgcgcagagtttcctgcaattcgaccgacatggcgacgtgctggacaacttcttcaagaacttcttccggcagtgcaaggaacccagccgcttcggtttctaccgcattgcggcagaccaagctgaaaatctcttagaggtgatgaagcaactgctgaaagaccccgaagcgaacaaggagctgctcgcccctcacaaggtggacacctccgactatgagaagaaggtgcaggaagagatggcagcacaacagacagagaaacaagaacctcaaaaacaggagaacatggaacaacggaaagaacagcaacaggacaaatccgaacagatgcagggcaaacgtggctaccagcccatcgacgagagtaaaatcaactggcaggagctggaggacagatggggcgtaaagcgggacaaccttgaaaagtccggcgaccttacgaagatgctcaactatggcaagtccgacttggtaaaggtcaaaccgaccttcggcggcgaatcattcgagctggacgcccgcctctccttcaagaaggacggtgagggaaacatcagcctcgtgccgcacttcatccgcaaggagcagaagctggatgagtacaaggaacacaaattctccgacaatgaccggaagaacctccgcgaaacgggcaatctcggtagggtcgtggacattgtggacagggaaacgggcgagatcatcccctcctacatcagcatcgaccgcaagacgaatgaaatcacggacattccggcaagcagggtgcgcatcccggagcgcatcggcaagacggaaatcaccacgcaggagcgggacatgctccgcgccggactgcccgtacgcgacaagctcatcgagcgcaacgacggcagaaagttcgtcaccaccctgcaagtgaacgtggagcagcgcggcgtggagttcgtgccgggaaccggcaagtcgccccgtaccgcacagacacaggaaaccaaaggcgacacatcgaaaagtcaggcgcagggcggggaaaatgccgcacagaccaagaaggagcaacgccgcaacacgtggacgaacgaggacggcagcatccgccccatcagcaaatggagcggcgtgagcttcaccgaccagcagaaagccgactatgtggcgggtaaagccgtgaagctggagaacgtgaccgacaagcagggcttccatgccacgatgtatatcaagttcaacccggagaagggacgcccgtaccgctacgacacgaaccctgacaatgcacagcaggttgctccgtccaacgagagccgcacgcaggtggcggtgaacaacgatggcaagaccaacgaggctacaaagaatctgagagagccgttgcagaaaggtcagaccaacccgaaggacgcccgccagcaacagcagcaggagaagccgcagaagaaaacgggcaagggcatgaaaatgtaatcccgtgtccgccactgaatccaaaataaaatccaaagtatcaacaaaaaagaagaagacatgaagacaatcattgcagaaaagccctccgtggcacgtgaaatcgcccgcatcgtgggcgcgacaaagagagaggaaggatatttcgagggaggcggttatgccgtgacatgggcattcggacacctcgttcagcttgccatgcccgacggctacggcgtgcgcggatttgtccgtgacaacctcccgattattcccgacacattcacgctcgtcccccgtcaggtcaggacggagaaaggttacaagcccgacagcggcgtggtgtcgcagataaaagtcatcaaaagactgttcgacacaagcgaacatatcatcgtggcgaccgatgccggacgcgagggagagcttatcttccgctacctctaccactatacgggttgcaccactcctttcgtgcgcctgtggatcagctctctcaccgacaaagctatccgcgagggactgcggaaactcgaagacggcagcaaatacgacaacctctacctcgccgccaaagcgcggagcgaatccgactggctcgtgggcatcaacggcacacaggcgttatccatcgccgccggacacggcacgtattccgtggggcgggtgcagacaccaacgttggctatggtatgtgaacgctactgggagaaccgccgctttacgtccgaagcattctggcagctccatatcgcaacggacggttgcgacggcgaagtcgtgaaattctcatcctccgagaaatggaaagagaaagaaccggcgatggaactatataataaggtaaaggcggcaggttgcgccactgtcacgaaagccgagcgcaaggagaagacggaggaaactcccttgctctacgacctgaccacgctccagaaagaagccaacgccaagcacggcttcacggcggaacagacgcttgaaatcgcgcagaaactctacgaaaagaagttgataacctatccgagaacgggaagccgctacatccccgaagacgtgtttgccgaaattcccaaactgctcgctttcatcggcacacagcccgaatggaaagacaaggtgcgggcaaaagccgccccgacacgccgcagcgtggacgacggcaaggtgacagaccaccatgccctgctcgtcacgggtgagaaaccgctcttcctctccaaagaggacaataccatctatcagatgattgccgggcgcatggtcgaggcattctctgagaaatgcgtcaaggatgtgaccactgtcacggcggaatgtgccggagtggagtttaccgtaaaaggcagcgtcgtgaagcaaaccggatggcgtgccgtctatggcgaggaaaaagaggaaattaccatccccggctggcaggaaggcgacacgctgacaccgaaaggctcgtccattaccgaaggaaagaccaaacccaagccgctgcataccgaagccaccctgctctcggcaatggaaacggcgggcaaggaaattgaggacgacgcactgcggcaggcgatgaaggactgtggcatcggtactcccgccacacgcgcctccatcatcgaaacgcttttcaagcgcggttacatggaacgctgcaagaagtcgcttgttcccaccgaaaaaggacttgccctcaattccgtcgtcaagacgatgcgcatcgccgatgttgccatgacgggcgaatgggaaaaggagctggcgcgtatcgagcgcggggaactgtccgacgacaccttccgcaaggagatagaggcgtacacacgtgagataacctccgaactgatctcgtgcgacaagctcttcggcagccgtgactccggctgcgcgtgtcccaagtgtggcacgggcaggatgcggttctacggcaaggtggtacgctgcgacaacacggagtgcggactgcccgtgttccggctgaaagcgggacgcaccctgtccgacgatgaaatcaaagacctgctcaccgaagggcataccaagctgctcaaagggttcaagagcaaacagggcaagagtttcgatgctgttgtcgcctttgacggggaatataacacgacttttgtgttcccggaggctaaaaaggacaagaaattttcaggacggaagaaatagtattaactttgccacttgttcagagtaatgaattgttcttcgataccggattacactcatactttggatttagtggtggcactcggagggataccgagtgcctttttcttcctttttccaaccgattatcccgttaattatcaatccgctaaatccaaagtaatgaacaacaagaagaaaaacgagggtcagaccgacttttcctattacggtctgtacctgctggactatctccgcacgaacaagtttgaacaggctgacgacaccgctttcatacgggaacgggccgaccgtgccgccgaaacgtatgagagggcacggcttgaaggctatcccgccgatggtgcgcaggaactggcgatggacacgctgctgcgcggactgcattattcccgttacgccatcctccgcgaagtcgtggaaaacgagtttgccgatgaagtgccggaagagaagcgtgaagcctttgtcctgaaactgctgccgcttgtcggcaacgtgttctccgtctatgacctctcggatgacaatttcgccctgtcttccgattacgacctgctctacacggagctgacgggagcaaccgtcctttacttagacgaatatggcgtttaaccgcaaacagaaactgcgggacaacatcgaggcgatacggacggcattcatccttgacagggaaaataggacagcgacaaccgaagagcgtgccatacttcaaaggtactgcggtttcggcggtctgaaatgtatcctcaaccctgcaaaggaactgacggatgccgtccggtgggcgaaatccgacctcgaactgttcgccccgacggtggagctgcacaggcttatccgtgagaacagcaaggacgaaacagagtacaagcggtttgtggattcgctgaaagcgtccgtgctgaccgctttctacacccccaaagagataaccgacaccatcgcggacgtgctggcagattacagcgtccgccccgcccgtatgctcgaaccgtcggcaggtgtcggcgtgttcgtggattccatgctgcggcacagccccaatgcggatgtgatggctttcgagaaggatctgctcacgggtacaatcttgaggcatctctatcccgaccagaaaatgcgcacctgcggttttgagaaaatcgaaagaccgttcaacaattatttcgacttggcggtgtccaacattccgttcggtgacattgccgtgttcgacgcggagtttcagcggagcgactctttcggcagacgctccgcccagaaaaccatccacaactatttctttctcaaaggactggatgccgtgcgtgacggcggtatcgtggcgttcatcacctcgcaaggggtattgaatagcaccaagacctccgtgcgtaacgagctgttcagtcaggccaatctggtatccgcgatacgcctgcccaacaacctgttcacggacaacgcgggcacggaggtgggcagtgacctgattgtcctgcaaaagaacctcagcaagaaggaaatgtcgcaggacgagcggctgatgaccgtgatacagacggacacgaaaaccgccctgaccgacaacgcctatttcatccaccacccggaacgcatcgtgcatacgatggcgaaacttgacacagacccctacgggaagcccgctatggtttatctgcacgagggcaaggcagcaggcatcgccggggatttgcgccgtatgctcgacgaggatttccattacaggcttgccatgcgcttgtattcgggttcaatccggcaggcaggaacggaagaaaaagttgccgttcaaaataaagtagagcgtcctgccataaaattggaaacagtatcctcggcgcagacggtggaaactccgacagaaaagccgcaacccgcagatgaaaagccggagatagaaccgcgcccgcaatattccgcaggcgtgcagctcaccctgcttgacctctgggggatgacggaagaggtcagccaaccgaaaacctccaaaaagaaaaagacggtgaaaaaggcagttacggcaaagtccactccgcccaaaccgaaagtcacggttacaccgacagctccaactgcaaaacccgcaatggagaataaggaggtgaaagcggagaacaccgccaagcctgccgacccggacgacatctatgccacactggactgggataccaatcctcccatcaacggtttctatgaaatgatgatgggtttgacgccggagcgtaggaaagaacttcgggaactggcaaggcagcataacgagaaacaagtggcggaaaagacggaagtgaaagccgtgccggaaacttcccgtgagcagccacgacaggaggaaacacagccggaggcagtcgccgcacctgccgttacagataccccatcggaagcggtggggactttccttttccccgacatcgaagcggaaaagccgaaggaggaagtcgtggacctttctccgcgtgcctaccaccgcacgccggagatgcacctgcgcgaagggtcgctggtggctgaccgggggcgtcataacatcggctacctgaaagacatcacgccatacggggcgacattccagccgctcgacctgaaaggataccagaaggaaaaggcgttgttgtatgtgtcgctgcgtgacgcctacgagcgtctgtaccgttatgaatcgctccggcgcgaggcaaatgttccgtggcgagagcatctgaatacctgttacgatgagtttgtcatgcgctacggcaacctcaacgccaagcagaacgtgaagttagtgatgatggatgcgggcgggcgcgacatcctttcgctggaacggatggaaaacggaaagttcgtcaaggcggacatcttcgagcatcctgtttccttcgcggtggagagccatgccaacgtaggctctcccgaagaagccctgtctgcgtcgctcaacaaatatggtacggtcaatctcgactatatgcgggagataaccgacagcacggcggaggatttgctcactgccctgcaagggcgcatctactacaatccgctcgtgaccggttacgaaatcaaagaccgtttcatcgccggaaatgtcatagagaaagcggaacgcatagaggcatggatgggtgacaatcccgaaaatgagcgtatgccggaggtgaagcaggcgttggaggctctgaaagatgccgagccgcagcgcatcgccttcgaggatctggacttcaatttcggggaacgctggattccgacgggtgtctatgccgcctacatgagccggctgttcgacacggaggtgaaaatcgcctattccgcaagcatggacgagttttcggtggtgtgcggctaccgcaccatgaaaatcacggacgagtttctggtgaaggggtattaccggaactatgacggtatgcacctcctaaaacacgccctgcacaacacctgccctgacatgatgaagtccatcggcaaggacgagcatggcaacgacatcaagatgcgcgacagcgagggaatacaactcgccaacgccaagattgacgagatacgaaacggcttctccgaatggctcgaagagcagtcgccgcagttcaaggagcggcttgtgacgatgtataaccgcaagttcaactgtttcgtgcgcccgcgctacgacggctcccatcagacctttcccgacctcaacctgaaagggctggcaagccggggtatcaagagcgtctatccctcacagatggattgcgtctggatgttgaaacagaacggcggcggaatttgcgaccacgaggtgggaaccggtaagacgctgataatgtgcatcgccgcgcatgagatgaagcgtctgaatttggcacacaagccgatgattatcgggctgaaagccaacgttgcggagattgcagccacctatcaggcggcatatcccaacgcacgtattctgtacgcttcggagaaggacttttcgaccgccaaccgtgtgcgcttcttcaataatataaagaacaacgactacgattgcgtcatcatgtcgcacgaccagttcggcaagataccgcagtcgccggaattgcagcagcgcatcctgcaagcagagcttgacacggtggaggaaaacctcgaagtgctacggcagcagggaaagaacgtgtcgcgggcgatgctgaaaggattggagaagcgcaagcacaaccttgaagcgaagctggagaaggtggaacacgccataaagtcacgcacggacgacgtggtggatttcaagcagatgggcatcgaccacatcttcatagatgagagccaccagttcaagaatctgactttcaacacgcgccacgaccgtgtggcgggattgggaaacagcgagggaagccagaaggcacttaacatgctctttgccatacgcaccatacaggagcgcacaggaaaagacttgggtgcgaccttcctctccggcacgactatcagcaactcactgactgaattgtacctgctgttcaagtacctgcgcccgaaggagctggaacggcaggacataaggtgtttcgacgcttgggcggcgatatttgccaagaagacgacggattttgaatttaacgtgacgaacaatgtggtccagaaggagcgtttccgctacttcatcaaagtgccggagcttgccgccttctataatgaaatcacggactaccgcacggcggaggatgtgggcgttgaccgtcctgccaagaacgagatactgcaccatataccgcccacgccggaacaggaggacttcatacagaaactgatgcagttcgccaagacgggcgatgccaccttgttgggcaggctgccgctttcggaaacggaagaaaaggcgaagatgctcatcgccacggactatgcccggaaaatggcactcgacatgcgcatgatagacccgaattacgaagatcatcccgacaacaaagcgagtcactgtgccaagatgatcgcggagtattatcaaaaatacgacgcccagaaaggcacgcagttcgttttctctgatttggggacataccagccgggcgacgggtggaacgtctattcggaaatcaagcgcaaactgacggaggactacggtataccgccaagcgaggtgcgcttcattcaggagtgcaagaccgacaaggcgcggaaggcggtgatagacgccatgaacgccgggacggtgcgtgtgctgttcggctctacctctatgctcggaacgggtgtgaacgcccagaaacggtgtgtggctatccatcatctcgatacgccgtgggtgcgacatgaagtcgcatagataattgttggaatgatacttacgggtatcagctttaacccgctgttccgtcagcggtagcctaccgaccgatgcaccttaatgttgtattaagcggtcgggacgaagtacactttcgcaagacaagacagaaccgtgaggggaagtcaagtacggttagtatcataccgtagagtggcgaggctggatagtatggttagcgcaagcgaactgttagtaaacttcgtaatgtcacgaaagagtgtaagatactggcacactctacccaaaagggaagcggtcggttaatcctctccatggtaggattacacggatataagcaccgccggaggatgagacagaacctaacctatccgttagttatctatgtggaacatggtaagcctgtatatctcctgtcatgtaaaaatgacaggtaagctgacagcaatgaaagccgaatggtgtgcaggtataagataacagaaaaagcgaatgccgttctgtaatggagcggatacggattgaaccgacatcacgggctgatgtgggcgacatcatccgacacgaaagtgggcagacttctgtgacgacattaggtaggcaatcaaaccgaatgttgtcaaatggtgattctttacaattaacttttagaactttcaaaaggaggaaagcaaatgaacgaaaacaagacatcgtgtgcgcctgctgacaatcagcaaacactttgggacagaatagactggactaaagcggagttggctgtcagaaagctacaagcacgaattgtaaaggctcagaaggaaggcagatacaacaaggtgaaagccttgcagtggacgctgacccactctttttacgcaaaagccttagccgtaaagagagttacttctaacggaggtggcaacacccccggagtggacatggaaacatgggagaaacccgaagcaaaaacacaagcgataagcgaactcaaacgcagaggctaccagccgaagccattgagaagagtccacatcaaaaagagtaatggcaaactgcgaccgttgggaataccgacaatgaaagacagagccatgcaagcactctaccttatggcattagaaccagtgtcggaaacaacagccgactcacgttcatacggtttccgcaaggaacgccgctgtatggacgcggtaatgcaatgccataacattctccgaaaaggctattctcccgaatggattctggagggtgacataaaggggtgcttcgaccacatcagccatgaatggctgcttgccaacatccctatggacaaggcaatactccgaaaatggttgaaatgcggctatatcttcaacaaacagatgttcccgacagaggagggaacgccacaaggtggcattatctctcccacgcttgccaatatgacattggacggattgcagaaagtccttgcagagaaatataaacgagttagaatcaaaggtaagttatattcgccaatggtgaatcttgtccgttacgctgatgactttataattacctgcgagaaccgtgaaacacttgaaaaggaaatcaagccattggtagccgactttatgtctgaaagaggtctgaccttatcagaagaaaagacggtgataaccaatatccgtgacggtttcgattttctcggtttcaacatccgcaaattcggcaatgaaatattgaccaagccgaccaagaaagccgaaaaacgctttatggagaatatccgtaaggtgacaaaaggtcataagggttgcaagcaggaatcattaatcaggatgttgaatgctaaaattcgaggatggggagcatattatcagcatggggcgacacgtgattcttttcacagaatcgaccatcagatatttctcgccttgtggcaatgggctaaacgccgtcattccaagaaagggaaacagtggataaaagaccgctattggcacaatatccgagggaacagctggacttttgcggctaagttcaagaaatcaaacggcaaagaagaccaacttaccttgttgaaactggcatcttcgtttccttttctgcaatatacgcagataaagggggacatgaatccgtttgacgcagactgccgcctgtacttcaataaaagaatgaagtcaaagatgcttgtgacgctgaaaggacgtaaatccctgctttacctatgggaaaagcaaggtcggaaatgtccgatatgtggtgaaccgattgacacgcataaggcatggaatgtaatgccgaccgtacaagacggacggaaatgcaatctgttggttcatgatgaatgtttcaaattatcccgtaaaaacaatggaaacaagaagtaggatgagccggtctctgcacacgaacagagactttgaaaagcttgagccgtatgaggggaaaccctcacgtacggttctgaggggggaagagggcagtaatgcccttgacctacccgatcgaccgtccgacttgcaacagcgtgacggacgcggagttagggcaggtaatgagattgccaaacatttcgccgggaacaacgtggatgtaatcatctacgcggtggagaagtcactggacagctacaagttcaacctcctgcactgcaagcagactttcataagccagctcaaaagcggtgcgatgggtgcgcgtaccatcgacgagggggcaatggacgaaaaatcgggcatgaatttctcggaatacatggcgttgctctccggcaataccgacctgttggacaaggcgaaactggaaaagcggatcgcatcgctcgaaggggaacgcaagtcgttcaacaagggcaagcgtgattcggagttcaagctggagtcaaagaccggcgagttgcgcaacaacacggctttcatagatgccatgacggaggactggaaccgcttcctgtcggtggtgcagaccgacaaggagggcaaccgccttaatataataaaggtggacggagtggattccgccgatgagaaggtcatcggaaagcgtttgcaggagatagccaagaatgccacgaccggagggttgtacacgcaggtcggtgaactttacggttttccgataaaggtggtgagcgaaaggatactcaaagagggattggagttcaccgacaaccgcttcgtggtcgaggggaactacaagtacacctacaacaacgggcatctggcgatggctgacccgttggccgccgcccgcaacttcctcaacgcgatggagaggataccctccatcatcgaccagtacaaggcgaagaacgaggtgctggagatggagataccgcagttacaggagatagcgggtaaggtgtggaagaaggaggacgagctgaagcagttgaagtccgaacttgccgcccttgaccgaaaaattcagctggagcttgcgccacccacgcccgaagtcgcagaaaaggagaatgaagggcaacagctcaagccggaagcggaagatgtgaggaacaggcaggcgcaatatcccgaaaatgcaccgccgcagatacgcagtccggcggatagtatcgttgccaaccatgtcataatcgggcgtccgggactgtatgccaaggaggaaacccggtccaaaggattgaaaatataacctaaggaattttatctgaagtattaataagggctatcccaaaaggtctaaaagtaaattttatcctttctgcaagtatctataggatggcaactgcatttttttctttttgggcagcccttattaaaatttattcttattttaggttatatacattcatgtccatttatgtaaaaaattcctgctgaccttgtttatgtcttgtcagtcaccatttgcaaaaccatatttgaccctcaaagaggctgaatttgataagtaacttgctacatactcataataaggagctaaatagaacacgaatgggaaatacacaaatgctaaactaaagaagatattggccaaaataaacgctataccgagagagaaacttgatttttcaacttcctaaaacggtgttgttcaaacatttctacttatttgtacttgccagttgaacctacgcttccctaataaaatgtctatggtaaaaagttaaaaaatcctcccacttttgttagatatatttttttgtgtaattttgtaatcgttatgcggcagtaataatatacatattaatacgagttagtaatcctgtagttctcatatgctacgaggaggtattaaaaggtgcgtttcgacaatgcatctactgtagtatattattgcttaatccaaatgaatattataaatttaggaattcttgctcacattgatgcaggaaaaacttccgtaaccgagaatctgctgtttgccagtggagcaacggaaaagtgcggccgtgtggataatggtgacaccataacggactctatggatatagagaaacgtagaggaattactgtccgggcttctacgacatctattatctggaatggagtgaaatgcaatatcattgacactccgggacacatggattttattgcggaagtggagcggacattcaaaatgcttgatggagcagtcctcatcttatccgcaaaggaaggcatacaagcgcagacaaagttgctgttcagtactttacaaaagctgcaaatcccgacaattatatttatcaataagattgaccgtgccggtgtgaatttggagcgtttgtatatggatataaaaacaaatctgtcgcaagatgtcctgtttatgcaaactgttgtcgatggatcggtttatccggtttgctcccaaacatatataaaggaagaatacaaagaatttgtatgcaaccatgacgacgatatattagaacgatatttggcggatagcgaaatttcaccggctgattattggaatacgataatcgctcttgtggcaaaagccaaagtctatccggtgctacatggatcagcaatgttcaatatcggtatcaatgagttgttggacgccatttcttcttttatacttcctccggcatcagtctcaaacagactttcagcttatctctataagatagagcatgaccccaaagggcataaaagaagttttcttaaaataattgacggaagtctgagacttcgagacgttgtaagaatcaacgattcggaaaaattcatcaagattaaaaatctaaagactatttatcagggcagagagataaatgttgatgaagtgggtgccaatgatatcgcgattgtagaagatatagaagattttcgaatcggagattatttaggtgctaaaccttgtttgattcaaggattatctcatcagcatcccgctctcaaatcctccgtccggccaaataagcccgaagagagaagcaaggtgatatccgctctgaatacattgtggattgaagacccgtctttgtccttttccataaactcatatagtgatgaattggaaatctcgttatatggtttgacccaaaaggaaatcatacagacattgctggaagaacgattttccgtaaaggtccattttgatgagatcaagactatctacaaagaacgacctataaaaaaggtcaataagattattcagatcgaagtaccacccaacccttactgggccacaatagggctgactcttgaacccttaccgttaggggcagggttgcaaatcgaaagtgacatctcctatggttatctgaaccattcttttcaaaatgccgtttttgaagggattcgtatgtcttgccaatctggtttacatggatgggaagtgacagatctgaaagtaacttttactcaagccgagtattatagcccggtaagtacacctgctgatttcagacagctgaccccttatgtcttcaggctggctttgcaacagtcaggtgtggacattctcgaaccgatgctctgttttgagttgcagataccccaagtagcgagttccaaagctattacagatttgcaaaaactgatgtctgagattgaagacatcagttgtaataatgagtggtgtcatattaaagggaaagttccattaaatacaagtaaagactatgcctcagaagtaagttcgtacactaagggcttaggcatttttatggttaagccatgtgggtatcaaataacaaaagacggttattctgataatatccgcatgaacgaaaaagataaacttttattcatgttccaaaaatcaatgtcattaaaataatggagcggtcaggaaatttctataaggcaatacggttgggatatatacttatctccattcttatcggatgtatggcatataatagcctctatgaatggcaggagatagaagcattagaacttggcaataaaaaaatagacgagctccgaaaagaaataaacaatatcaatattcaaatgataaaattttctctattgggtgaaacaatactggaatggaacgataaagatatcgagcattaccatgcacggcgtatggcaatggacagtatgctctgccgtttcaaggccacctatccagcagagcgcatcgatagtgtgcgcagtcttttagaggataaggaacgacagatgttccagatagtccggttaatggatgaacaacaatctattaacaagaagatagccaatcaaattccggttattgtacagaaaagtgtgcaggaacagtccaaaaagccaaaacgaaaaggtttcttaggcatattcggcaaaaaaaaggaagtaactccagcagtatcaaccactatccttcattcggtcaatagaaacgtaatcagcgaacagaaagtgcaggatcgccaattgtcggaacaagccgacagccttgcagctcgtaatgcagaacttaacagacaactgcaagaattgatttgccaaatagaagaaaaggtacaaaccgaactgcaaagccgggaaaacgaaatagttgccatgcgtgaaaagtcatttatgcaagtaggcggtttaatgggattcgttcttctattgttgttaatttcctacatcatcatacatcgtgatgcaaaaagcattaaacaatacaagcacaagacaactgatttgataaggcaactggaacaatccgtacaacggaacgaggcactgataacgtcaaggaagaaggcggtacatactatcacccatgaactgcgcacaccgctgacagcaataacaggctatgccggactgatacggaaagaacagtgtgaggataagtccgggcagtatatccaaaacatactgcaatcctccgaccgtatgcgggatatgcttaacactttgcttgacttcttccgcctggacaacggcaaggaacagccccgtctgtcaccctgccggatttcagcaatcacgcacacacttgaaacggagttcatgcctgttgccgtgaacaaagggctgtccttgtccgtgaagactggacacgatgccattgtattgaccgacaaagagcgaataatacaaatcgggaataacctgctgtcaaacgctgtcaagttcacagaagaaggcggtgtttctttgattactgaatatgataatggagttctgacactggtcgttgaagatacaggtacaggcatgacagaagaggaacagaaacaagcgttcggtgcgtttgaacgtctatcaaatgccgccgcaaaggagggtttcgggcttgggcttgccataatgcgtaatattgtgtcgatgcttggcggaacaatccgtttagacagcaagaaagggaaaggcagtcgtttcacagttgaaatttctatgcaggaagctgaagaacagcttggatatacaagcaatacacctgtttatcataacaataaattccatgatgttgtcgccattgacaatgatgaggtattacttctgatgctgaaagagatgtattcccaagaaggaatacactgcgacacttgcaccgatgctgcggcactgatggaaatgatacgccagaaagaatacagcctgttgctgacagacttgaatatgcccgatataaacggtttcgaattgctggaactgttgcgttcgtccaacgtgggcaattcaccaacaatcccggtggttgtggcaaccgcttcgggcagttgtaacaaaggggaactattggcaaaaggctttgccggatgcctgttcaaaccgttctccatatcggaactgatggaggtttccgacaggtgtgccataaaagcgacaccggacgggaaaccggacttttccgccttattgtcctatggcaatgaagccgtcatgctggaaaagttgataactgaaacagaaaaggaaatgcaggcggtacgggatgcagcaaaagaaaaagacctgcaaaagctggattccctgatccaccacctgcgcagttcgtgggaggtgctccgtgccgaccaaccgctgaatgtactttacggattgcttcgtggcgatgctctcccggatggtgaagcgttaagccatgccgtgactgccgtgctggataagggagtggaaataatacggttggcagaagaggaaaggagaaaatacgaagatgaataagacaaaaataattgtggtggaagacaacatcgtgtattgcgaatatgtctgcaatatgctgtcacgggagggctaccgcaatatgaaggcttaccacctctcaaccgcgaagaaacatctgcaacaggcaacagataatgatatcgtggttgccgacctgcgtctgcctgacggcagtggcatagaccttttgtgctggatgcgaaaggagggaaagatgcagcccttcatcattatgaccgactacgccgaagttaataccgccgtggaaagcatgaaactcggctcgatagactatattcccaaacagcttgtggaggataaacttgtccccctgatccgttccatactgaaagaacgtcaggcaggacaacgccgtatgcctatattcgcccgtgaaggttccgcctttcagaaaatcatgcaccgcataaggctggtagccgccaccgatatgagcgtgatgatatttggtgagaacggcacgggcaaggagcatattgcccacctgttgcatgacaagagcaaacgtgcaggcaagccatttgtggcggtggactgcggttcactctccaaagagcttgcaccgtcggctttcttcggacacgtcaaaggtgcatttacaggtgcggacaatgccaagaaaggatatttccatgaggcggaaggcggcacgttgtttctggacgaggtaggaaacctcgcgttggaaacccaacagatgttgctccgtgccatacaggagaggcggtatcgcccggtcggagacaaggcagaccggaatttcaatgtccgcatcatcgctgctaccaatgaagatttggaggtatcggtgaatgaaaagcgttttcggcaggatcttctgtaccgcctgcacgacttcgggataaccgttcctccgttgcgtgactgtcaagaagacattatgccgctggcagagttcttccgtgatatggcaaacagagagctggagtgtagcgtgagcgggttcagttccgaagcacgtaaagcgttgctgacacacgcatggccgggcaacgtgcgggaacttcggcagaaagttatgggtgctgtattgcaggcgcaggaaggtgttgtcatgaaagagcatctggaacttgccgtgacgaaaccgacctctactgtcagcttcgccttgcgcaatgacgcggaggataaggagcggatattgcgtgcgttgaaacaggcaaacggcaaccggagtgtcgccgcagaactgctcggcataggcaggacaacactatacagcaaacttgaagagtatggacttaaatataaattcaagcaatcatagcccgtaattcactgaatttggctatctttgcataacatttgagaaaaacggcgattggcaggagcttttcgccgccaacatataggataagaccgcaaggcgtttcaagcgaaaatctggtaaattggaactacggagacgattgcgtgatgcttatgctatgcttacgcatagcgtgcattcacgtactctccgtaaaggctttaccagagccatcgcttgaaggtagtgtgaattgcacgctacttttttacccttgcctaacgaaaggaaacgattatgggtaaagttcagattctcgccgtactgacgatggacggatgtctttcttcagagttatatgataaagcacatcaggatttgtgccttgaccgttgcggtcttgatgaaatcaggaagaaagccttttaccgtgtgacaccggactattccatttcaatgctgcacgaatggagaaaagactgcacaaacatccgttacctcgcggaagccacaccggacacggcagactatataaacggactgctgcggatgcacgctgtggatgaaatcatactatacaccgttcctttcatatccggaagcggacgacatttttttaagtcggctctgccagagcaacactggacgctttcctctttgaaaagctatcccaacggtgtatgtcgcattatctatatccttgataaaaaagcaagatagccaaaatgtgcggcaagcatacatttctattttcaggaatagaataaatgttccgattacaaacaatttaagtcggagataatttgtccttgtgaaaaaatactgaattttatacctctgaaatccagcactttgtaaaattgagtgttggattttttattttctgccgcgttttttgccaattatattcatgtgcgcacgcagaaaacaaagtgtaattttcaaaattgacagaaccatgaattatttcttgctggcggaaaccgactttttccgcctgataaacgaagccggcgactgcaatatggaaacggcatacacggctttcgccacccaagtgatcgaactgtgcaacggcggcatggacatgaaccttaccgtcatcgcgcttgcctacatcgaaatcgagttgcagcaccatcccgtacgtaatctgtcagaagaaaaaagagagattgccgcctacgtcagcaaggctctgtctttcgtaagaaagatgcagaaattccttgccacgccccaagtgccaccactaatatccgccaacaacgcaacagaaaccaccgccagccttcttcaatggacgggcaatgccatcgacctcgtggaacttatctacggcatagacgtgatgggctgcatcaacaacggcaatatgccgctcaaacagctcgccccacttctctataagatattcggggttgattctaaagactgctaccgcttctacactgatatcaaacgccggaagaacgaaagccgcacctatttcattgacaggatgcaggaaaaactgaacgagagaatgttgcgtgatgaggagttggagcggatgagaaaataaaaaaatatccattacatatgagaagacaggaatactcgtatcctgtctttttattttcatttaattatatattaattagcacaatatatgtgagtttttcattcctataaggacaaatttcagaaacgtatgtctggtaaattattgagtcatcatagtatgaacatatatcattactaaaaacaatgaaacaacttccataagattgtggttgtaaaaatcgccatttaatagcccgttttttttgtaaaattcgccaattaaaaaaatatgattatctttgcattatattttataaggtatggaaacagtaaatagaatacttcaagagaagattacagcacgaatcgcgcccaataaagcagtactgatttttggtgctcgccgtgttggtaaaacggtaatgatgcgtaaaattgtggacaactattcaggtaggacgatgatgctcaacggcgaagactacgacacattagcactattggagaatcgctcaatagccaattatcggcatttattggatggtattgatttgctggctattgatgaggcacagaacataccacaaatcggtagtattctgaagttgatagttgatgaaataccgggaataagtgtcttggcaagtggttcttcgtcattcgatttgctgaataagactggtgaaccgttggtcggccgcagtacgcaatttctccttacaccattctcgcaacgggaaatcgcacagacggaaacggcacttgaaacccgccagaacctcgaagcgcgcttgatttacggttcctatcccgaagtagtaatgatggagaactatgaacgtaaaacagactacctacgtgatattgtcggtgcatacctgcttaaagatatcttagcaattgacggcttaaaaaattcgagcaagatgcgcgatctactgcgattgatagcttttcagttgggcagcgaagtttcttacgaagagttaggtaaacaactcggcatgagcaagacgaccgttgaaaaatacctcgacctattggaaaaggtcttcgttatctatcgtctgggggcttattcgcgtaacctacgcaaggaggttacaaaagctggcaagtggtacttctacgacaacggcattcgcaatgccattatcggggctttctcaccgctggccattcggcaggatgtcggtgcgctgtgggagaactacatcatcggagagcggcgcaaagcgaacttcaatgagggactgcacagggagttctatttctggcgcacctacgacaaacaggaaatcgacctgattgaggagagtgccgacagtcttaccgccttggagttcaagtggggaaataaaatgccggccgcaccgaaagccttccaagaagcctatccctatgccgagtttcatgtggtaaatcgggagaattatttggagttcgtataatcaataaattacgtatatggaaacaaaactacaatccaaacagcaatatccgcggtttatccaaaataaaccgtgtggtattgacaaattcgatggaggttcgcaagaaaggttggcaaaaactattgctcgccatttttgtcagaatgattcattggatgaggaatgtactttacctcgaattatcggcatcgaaggtatttggggatctggaaaatccaacgtggttaaaatgttggaacgtgaattatcagacgactattacttttttgagtatgacgcatggggacatcaagaggacttgcaacgccgctctatattggaattgcttacaagcaaacttattgatgatggtatcctatctggaaatgcaacaataaaagtcaaaggtggaggtacgaaaaccgtatcatggtctgaaaagctgaaatatttattagcccgtaaaacggagaccgtaaccgaaaaatatccccttatcagtaatggtatggttgcggcatttttggttgcagttttaactccgatatttacatttattgcgtatgcagtaaaacctacacccacaacatggtggttttctttattgtctattatcatagctgcactgccagttcttattgcattgtgcgtttggaaatgggcatatagcaaagatcataaatatggatggagttatatgttagctatttatcaagataaagtcgaaaaggacgtttgctatgagactttgagcgaagacgaaccaacggtttacgagttcaaaacatggatgcaagacatttctgattttatcaaggaaaaaggacaacgtaaattagtccttgtttttgacaacatggatcgtctccccgctgaaaaagtaaaagaattatggtcttctatccatacgttcttcgccgatagcggttttgaaaatgtttgggctgttattcctttcgatgaaacacatttagcttgtgcattcggagatgagaccgacgaacaaacgaaacaactgaccaagtattttatcaataaaactttccctattgtttatcgtgttgctcctcctgttattaccgactatcgaagtatattcaacaaactgtttgttgaagcatttggagaaacagaaaatgaagcgaaagaaactataaatcggatattcagattggtaaatcctaatgccaatgttagggaaattatatcatatatcaatgagatggtcgctcttaaacaagagtggtgtaacgaaattttgatgataaacatagcattgttctgtttgaagaagacggatattctggcaaatccagtagaacaaatattgtccggcgactatctgaatggcattcaaacaataattaacaatgatctgcaaacacaacgcgaaattgcagctttggtatatggtgtcgatgttgaagatgctcgacaaattccattgaaaaaatatattgaaggctgcatcaacggagaagaagaccacgacataaatcaatatgcagagactaataaacaatttgacactgtattagaagaagttatacaatgtatggacaatgcgcttatcgataagattatacattgtttgcataaattaactcgaaagagcgatgttattctgcgtgtatggcaaagaatagcacaattgaaattaaaagaatccatagagaagcaggtgttccctgtcgaataccaagaactgctgttgcatttagacacggaaagccaaaaccatgtgattgctcaattatataagaagatagttcggttcaatgacttcaatggcggcgactatttcaaaacgttagatgcaatagacaggtttattgcgcaaaataagttggcgtgcgattttacgtcattgattgaagcaaaaacagtcaagccaaatacatttatcgattatattcaagctgcaaatgcaacagatgctgcctatcgggataacgcgacaactaaagcatataaatattatcaagtagcaacaaattcggaggcgctcgataattatttggcaaacttactacccgataatttcgaccatgcagatattgtaaaaacgttaaaagataattctacctatacgtttccaacgcttttgcaagcgatcacgaattgcattgatgaacagaatgtaaataaagataatataggggctatatttacaacctatcgtttattggcatctgacgaagaaagacctttacctgtaacgttagattcaacctacataaatcagttgcattctgaattagaaactgatggccgaaacattaaagagtctggatattacgatttagtcgccatgcaattggcacatggtcattccgtttccttaatagagggtggagatataaaatatgttgcagaactcatggactattatgtggatcatggagacttattagtaaatagtgtgggatggaatataccgctattaaatgaaacactacaatacatggtaaatcataaacttggctataaattattgctctcagacatattgccccaatttgaagatattaagaacagaataggtgtaacggatgaggtatttatcgagcatttagcagagtggaataccgatttggataagtatatcactaagaacaatattaaagatgtaattcctgacgcatctttttacgatttgaccactaaaataagcaatgtcctgaccgatcatatcaataaaatagcgttcgaagcgttgtctgaaataagtgttgatacattatacgcccaaagaacagcacatacatcatattattggtttgtcgcaataaaacatttactggctaaaatcaaatccttgccagataacttgactgaatttggcaaaaagattctgatggatattgcttctggaactcaaagtttgaatcctttccctaattgtttcaagaatatagttgaaagattggataaacgaaaaattaaatcgacagttaccgatataagaaatgatttctgcatcggtaaaaagactatcaatgcaataaagtttcaatttttcgaaacatggcttagatcgcatggtaatttgaaaagtcaagctggagacgttattgataaaatagtgaaacctgtaatttccgatggggcatgccgttcattgattctgcaaaacaaagatttttatatggatttaataaatacagcaggggatgatgcttatgaattgaaaaagagtctccgaaacctcatacaaaaagattcagatccgcaattggttaaatttgtcaattcgatagattcagtacctgaggttgaaaccgcgtaagtatttgtctaacaagtccgaattttacgattttacccgtcagaactgaagtgccccccaaaaaaattgtatccaacttttgggggtcacttcaaacttcgatagggataattttcaattttggggacttgttagacagtctcattatctggtagcagtttacacagcaccggatcgtttttgatacgctccagttcctcctgcacaatctgcttcacctcttccttgatgcgccggtagttcgcctgcaccgtttccttcatgcggtcgttgccgtcctcgtccgtgaagtttgtaatgacgggaattttcttgtaggcactttcttcccgtttcaccttttcggcatccaccacaatctcgcaatgaaaaatcttctgctcgatacgctcgttgaagttgtcggatacagaaccgacaaacattccctgcgtaagcccggaaatcttactcggtggaatgagcgcgtccatctgcgtgttgatggaggtggaaacatcctgccggttgatggagatggactgccgtttctgcaacaccttaccgaaccgctcggagagcgtcttggctgtttcccccaccacctgaccggagaaaatattgccgacagtgttcatcaccactttcgcctctttgtccccgtagtcacgcactaactggctgaaatcctgaaagcccagacacacggcaaccttgttgcttcgggcggtagctataagattgtccaaccctttgaagtatattgtgggcaactcgtcgatgatgaccgatgacttcagcatccccttcttgttgatgagcttcacgatacgggaattatacagaccgagtgccgcaccgtagatattctgacggtcgggattgttacccacgcagaggattttcggctcttcgggattgttgatgtccagcgtaaactcgctgtctgacatcacccagtagagctgcggtgaaatcatcctcgaaagcgggatttttgccgacgctatctgacccatgagctgctccgcagcccctccaagccacgcatccatgaacggcgaaaggtagttctccagctccggataagaggtcagtatcggaaatatatcctcgtaacggcggttcagaaactcgatagcatggggaaacgtgcaaaacttcccgttctgatagattttgagataccagataatactggcaaacagaatgataggtgactccacgaagaagtcgccctgcttttgcacccacgttttattgaggttgagcattattgtgtaggcactctcataggcatccgtaatatcttccataaaatccgggtgaatgggattgcaccgatgagagcgtcgcgggtcgtcgaagttgatcacatagaacttcggctttaccttgtagccgtccgggtggttcagcaaatggttgtaggcaatagtagataggtcgggatacttgaaatcgtagatgtattgactaaagcccttttcaatctgttgcttgataaaattgtttaccacggcataggacttgccgctgcccggcgtacccaacacgatggacgcacggaagggattaactacattgatccaaccgttgttccagcgtttcctgtaatagaaacgtgtcggcagattgaccgaatactcgctttcgataagcctcgtttcctgcatgaaactctcgttctcgttgttgaaaacatcctccatcaaattgtgtttcaacaggcggctcatccacagaccacccatcaacaggcagacatagcccgttccaatggtaaggacatacagtcccgtcaccgcttcaagcggcagcggcaggggcagcaaccaccagttcaggaaaaacagcacgaacccgacggcaaatgctgtccagattctcccccaagtgattttctcacccttgacacccttcgtacccagacaggacaaggcaagcaaaaggacggaaaacagcttcgtgtagagaatggaatggaacagccccgccgtgcggtcgaagttcagaaggattttgtccaccacgccgatgttcacgccccacagccggatggcttcgtagcagaaccagtacacgttcatgaccactaaaatgatactcacggcacgcagaaaatccatgattttcgccaatgccctcaaatcgtcttcttgttgtgacatacattgattttttaattgttgatactctgattacatacccaagcccttgcgttttttcttctttttgcgcttcatcgcccggatgaaagcctcttcctcggcatctaccgccggaccttcgggagtgagcaagcccataccgcccgatatatcttcactgtcgtaggcggtctgcccgtgtgccttgtccgcagcatccacagggatggatagcggtatcggcggttgtccggcgtatggcagggtgaagtgttcctgcaaggcattcgccgaaagctccttacccatgcgcgaaccgttcagcacgcatcccgtgcggtggtcgatgaaggtagccccatagatgcgcccttcctctgtgtagcgcagtacggtgtcgatgcccttctctttgagttgggatacaaatttgtccttgtcataagtgccttgcagcacggaaaggacggtgcgtttcgtcatgtctgccagtttcctatccttgatttccgatttggaacggacaaacttcttctgtacggcttcatagcctgcggacttcccgaaaagcgaggatttgaacgggttgcccaccttgttacccttgtcgtccgtgacggaatagaccagcccgtgatactcccgtccgcgcacgttgcccctcgcttcctccaccgtcatattatataaggaaaggagcgcacggtattcgcccatcgtctggaaacggtactgcccattcagagccttcacggtgttgcctacctgcttcttcacatcacctgccgatgcggccaccttgcgcaacggattatccaatctctgatttttacgttctgccggatgcaatccgtacttctgttccagttccctgcggatacggtcgctgcggcggtagagaaaatcccggttgagccttttcccgttctcgtccacgttgaccgtcacgatgtgcaggtggtggcggtcgatgtcctcgtgcttgaatacaagataaggctggtttccgaaaccgagtttttccagatactcgcgggcgatattctgcaactcaatatcggtcagcacatcctccgggtgcgggttgagagagatatgcaccaccggcttctcgatcttcatctgcggtggcaggaaggtgagaaaaccctccatcgccttgcctatgtccaccgttcccgaaccgtcattgtagatgcggttggtggtgagaagccgcccctgcgcctcgttaatcttctccccgttgtaggcaatcgcgccgtacaacgaacttcctacactgatttttgcgaccattttgcctccatttcccttgaaagttccacaatccggcggctcagtttcacgagttcgacggtgtgttgctctaatttgtagagcaacgccatcgcctttttctctgaaaaatgcagcctcagttccttcacgacttggttgtaattcgtacccacggcacggaattgtgcatgaaaatccgacagtttggtgtaatagtccaccaacgtcttgtccaccttcagcaccttgaacggttgcccgaagaagtgcgctttgaggaaaacagaccgtgcatagacacccgattttccgaacatggcgaggaaacggttgtgttcctcctcgttgaaacggacggtgtaccggtacaccgccggatcaagtttgggatttctccctgatttgcttttccttttctctttcatattactttggatttagcggattgacggcataagccgccgcttcggattacagcaccgcagttctgaaaggcttcccgacttcggagggaaagcccgccccctgcaagggcaagtgcttttcgtggctgctcaaaatattttgagcggctgaaaagacatcttgctatgttcaggtgaacataaaaatccgtcaggggacggattgggaaaatacctttcaggactccgggccgcgcgtcatcggcgaaccctgctgtccgggtgcaaagttacgcccttaaagcggtatcggacagatgcttgacccggtcaatgactgccaaccggcgcaacgtgccgccacttgccggagaagtgatacaggttccaaaatatacttgtttatttgcagcatgattcaagaaacgaacgatttgaagatatgataaacggaacattcaaatacccggaaatccgcttcttcggatacttgccgaaacggatacccgaaccgtcggaaacccggttctccgacaattcggtgacgtatggattcaatgacttcatgacgcaatgtcgtcaatcaccatttgtccgacgcaccgcttcaccacagaaccggatacgcgacgacccgcctgcgtgtgtagtcacggaagcggatggtgcgacagccaaatccgtatggaaacagaaaaacaaatcatcaacaattaaaataaatggaactatgagtaaggaaatcttcgttgcattcgcaacacagaaaggtggcatcggcaaatccactgtcacggcacttgccgccagctacctgcacaacgtgaaaggctacaatgtcgccgtcgtggactgcgacgacccgcagcacagcatccacgggctgcgcgaacacgaaatggggcttatcgacagcagcacctacttcaaggctctcgcttgcgaccatttccgccggatcaaaaagaacgcctacaccatcgtcaaaagcaatgcggtgaacgccctcgacgatgccgagaggatgattgccactgaggacgtgaaacccgacgtggtgttcttcgacatgcccggcacactccgaagcaacggcgtgataaagacgctctcgcagatggactacattttcactccgctgagtgccgaccgctttgtcgtggagagtaccctgaaattcgtcacgatgttccgcgacaggctgatgactaccggacaggcgaaaacaaaggggctgcatctgttctggacgatggtggacggcagggagaggaacgacttgtacggcatctacgaggaagtgatagccgaaatgggctttccggtactttccacccgcttgcccgacagcaagaagttccgccgtgacctttcggaagagcgcaagagcgttttccgctccaccatcttcccgatggacacggcactgctgaaagggagtggcatccgggagttttccgaagagataagcgacatcatcagaccgcagtgagcatgggcagcaggaaagtgaacacggaaggcatcgacgaggaactgctgttagcctccatcgggcggcgcacacaggacgggacactgcgccccgcacaggaagtacccgcagctgcaccgaccgaagaggacaccgccgcaccggaaccatctcctgtgcaacccgtaacacgggaaaaagcgcagagggaaagtggacgccggaaaaggcaggacgaggactacaacgagctattcctgcgccgcaacgagataaagacccgccaatgtgtctatatcagccgtgacgtccacggcaagatcctcagaatcgtgaacgacatcgccggaggggaaatctcagtaggcggatatgtggataccgtgctgcgccagcatctggaacagcacaaggagagaatcaacgaactgtacaagaaacaacgtgaagatctgatttgaaaatggaaaaagaaatgacaccgaatgaaaaaagaccacagcaagactgcggaggtatgtttacccaagtgcaggcgagtgtggaaatactgtcgcctgtcccggtaagcggcaaatgcagtgagaaggactatgaacgcctgttcatccgcgacccggaagtaaaggcacgtgaggggaagatggcgtatgtgcgcccggagtaccacgagcgtatcatgcgtatcacccgtgtaatcgggcatgaccggcttacgctgtccgcttacatcgaccatgtgctgacgcaccacttcaaccagtgcgaagatgcgataaagagcctttatgcccgaaattacaattcagtattctaaccaaaaacggaaggatatgaattacacaatcagcatgacagacattctgctggcggtatcggtcggctgcaacctctggttcctgttcctgctcctttacgagcgcatcatggacacgcggattgtccgcttcttcaagggcattgtcggattatggcggtcactggacgggaatgaggctaaacgcatagcggcacacgaggaagtccctgcggaaaaggcggacatcatcggcaagagccgtttcaggatggcatccacccggacaaccgctgccataccgacgcaagaagccgccactattgaaaaaggcattgagctgtcggaggaagaggctacttttgacgacggaaaaacgggaaacgcatcccgcccggcacaagtcccggaggaaaaactcgatgagaccttcacgagcataccgccggaggaactgggatacggggacgacgaaccggaagaggacgcctcggacacgccacgggcttcgggcagcagctttgacgagattgacgacgcctgcaagaccgccaaaaacccggacgcgacacaggcggaacgtgaaaaggcggctaaggtgttcaccgacatggagggcacggagttgtacgagaaaatgatggaaggctcttcggagataggcatccgcatcaaggggcttatcgagattcggctgaagaaatctgaaaaggagttcgtcgtgccggacaacatcgaggagttcgacattcgcaactatgtatgacaacaataaaagaaatgaacatgaaagaatgacatcaacccacgcggcgaggaaacgcaaggcgcatccccatccgcaacggacacgcccacgtccgtggaaacaaacgggcatccactaaaaccaaagtaaagaaacaaagtatcaaccgcccgacaaaggaccatccacccttttgacggcaaaaaacaagaacagtttatgaacaagaacatcttgaaaaacagaaaagcaatcctctccgcggcacttgtcatcgccgcaaccgcctccgctttcgcgcagggaaacggcatcgcgggcatcaacgaagccacctctatggtgagttcttatttcgaccccggaactaaactgatatacgccatcggtgcagtcgtcgggcttatcgggggcgtaaaagtgtacggcaagttttcatcgggcgaccccgacaccagcaagacagccgcctcgtggttcggcgcgtgcatcttcctgattgttgccgccaccatcctgcgctcattcttcctttaataaataatgtatggctgaatacccaatcaacaagggtatcggccgtccggtagagttcaagggcttgaaggcacagtacctcttcatcttctgcggaggtctgctggctctcttcgtcctgttcgtcatcctctacatggtcggtatcgaccagtggatatgtatcggcttcggcgcggcatcgtcctccctccttgtatggcagaccttcgcgctgaacgcccggtacggtgaacacgggctgatgaaattaggagcggcacggagccatccccgataccttatcaaccggcggcggataacccgtctgttcaaacgacaacgaaaggaagaaagacaatgaggaatacatcgaaaatgacaacactggaaaacaggttcccacttttagcggtggagcatggctgcatcatctcaaaggacgccgacatcacggtggctttcgaggtggaactaccggaactttacaccgtgacgggtgcggagtacgaggcgatacacagttgctggtgcaaggctatcaaggtgctgccggactactccgtcgtccacaaacaggactggttcatcaaggaacgctacaaaccggagcttcagaaggacgacatgagctttttaagccgctctttcgagcgtcacttcaacgagcgtccgtacctgaaacacacctgctacctctacctgaccaagacaacaaaggagcgtaaccggatgcagagcaatttcagcacgctgtgccggggacatatcatcccgaaggagctggacagggaaaccacgaccaagttcttggaagcctgcgaacagttcgagcgcatcatgaacgacagcgggcttgtcaggctgcgccgcctctccaccgatgagattgtgggtactgagggaaagacgggacttattgaacgctacttctcgctcatgccggaaggtgacaccaccttgcaggacatcgagctttcggcaagggagatgcgcatcggcgacaaccgcctgtgtctgcacaccctctccgacgcggaagacctgccgggcaaggtggctaccgacacccgttacgagaagctctccaccgaccggagtgactgccgactgtcattcgcctccccggtggggcttctgctctcctgcaaccatatctacaaccagtatgtgctgatagacaacagtgaggaaaccttgcagaagttcgagaagtccgcccgtaacatgcagtcgctatctcgctattcaaggagcaacagcatcaaccgcgagtggatagaccaatacctgaacgaagcccattcctacggactgacctcggtacgggcacacttcaacgtcatggcgtggagcgacgatgcggaggaactgaagcatatcaagaacgacgtgggcagccagttggcaagcatggaatgcgtgccgcgccacaacaccatcgactgcccgacactctactgggcggcgatacccggcaatgcggcggacttcccggcggaagagagtttccacaccttcatcgaacaggcggtgtgcctgttcacagaggaaaccaactaccgcagctcgctctcgcccttcggcatcaagatggtggacaggctcacgggaaaaccgctgcaccttgacatctccgacctgcccatgaagcgaggtatcacgaccaaccgcaacaagttcgtgctgggtccttcgggcagcggcaagtctttcttcatgaaccacctcgtgcgccaatattatgagcaaggcgcacatgtggtattggtggacacgggaaactcctatcagggcttgtgcggcatgatccgacgcaagacaggcggagcggacggtgtgtatttcacctacacggaagataagcccatcagcttcaacccgttctacaccgacgattacatcttcgacgtggagaagaaggacagcatcaagaccctgttgctgacgctctggaagtcggaggacgacaaggtgacaaagacggagagcggcgagctgggcagtgccgtgagtgcctatattgagcgcatccaatccgaccgtagcatcgtgccgtcgttcaacaccttctacgagtatatgcgtgacgactaccgcaaggaactggcacagcgtgacatcaaggtggagaagtccgacttcaacatcgacaacatgctcaccaccatgcggcagtattaccggggcgggcgttacgatttcctgctcaactccacggagaacatcgacctgctcggcaagcggttcatcgtcttcgagatagattcgattaaagaaaaccgcgaactgttccccgtcgtgaccatcatcatcatggaagccttcatcaacaagatgcggcggctgaaaggcgtgcggaaacagcttatcgtggaagaggcttggctgtgacatgtaagtcttgtatatgattgttcaactttcattccacgagttggaaatagaacgattgaacctgttgttccgtcaacagtagcctatgggaacgtgcggtattaagcaatgaacccgtgcggtaacagaaccaacaatgaagcccttccgaaaggagaagtctgaaccgtgaggggatgacaactgccgttagtatcgaacgacaggggagctaggctgaatggtatgaataacgtaatgtgaaccgttgataaacgtcgtaacttcgaatgagctgctaatgatactgggctctaacccaaaagggatgcagtcggataaccttctccatgctaaggttacacggacataacgactgccggcggatagacggattctaacccattcgtttgtcatatacaagaaacatggtaaacccgtacttctcctgttaacagcaggtaagcagaccgtaagtgaagccgaatggagtgcgggcagaggaatgcggagaaagcgaatgccgttctgtaacggaacggatagaggttgaaacatcacctcacacgaaagtgggcagacttccgcatggtggatgttttacaagaaacttatagaacttattaaaggagaaaagcaaatgaacgagattaaaacatcgtgtgcatctactgaccggaaatggagcacttgggaaagcatagactggaacaagtgtgagatagcggttaataagctacaagcacgtattgtaaaagctcaaaaggcgggcaaacacggcaaggtgaaatccttgcaatgggtgctaacgcattcgttttacgctaaagctttagccgtaaagcgtgttacatcaaacagtggcagtgacaccgcaggcgttgacaaggtgaaatggtcaactcccaatgccagattcaaggctatcggtgaactgaaaagaagaggctacaagccccagccgttaaaaagggtcaatatcaaaaagagtaatgggaaactacgtcctttaggtatcccgacgatgaaagacagggctatgcaggcattatacctgcttgcgttggaacctgtatcggaaacaactgcggacagtaattcctacggtttccgtaaagagagaagtactggagatgcaagggaacaatgtttttgtgtccttgcaaagaaaacttctcccgaatggattatggagggtgacatcaaaggttgtttcgaccacatcagccacgaatggctgctgaacaatatccctatggataaagtgatgctgcggaaatggctcaaatgcggttttgtcttcaacaaggagctattccccacggaagagggtaccccacagggcggtatcatttcaccaactcttgcgaatatgacactggacgggctgcaaactatgcttgcagagaagtatcacaagaaatttgtaaacaggaaaacgacctactatcccaaagtacatcttgtacgctatgcggatgattttatcatcacgggtagaagcaaggaagctttggaagaaatcaaaccgttagtagtagactttctcaaggaaaggggattaaccctgtcggaagagaaaacaaagattacacacattgatgacggatttgattttcttgggtacaatatccgaaaatacaaaggagtgcttctaatcaaaccgtccaaaaagagcctgaagaaattcatgcagaaaatccggggaatcattgattccaataaaggaagcaaacaggaatcacttataaggctcttgaatcctgtgataacaggctgggtaaactactataagaattgtgtggcttctgacacattcagaaaagctgactacctgatatttgaaaagttgtggcaatgggctaagagacgacaccccaagaaaggcaaatactggattgccgaccgatactttacacgggtaaaaaaccgcaactggtgcttcgtggcaaacttcaagaaaggcaagactgatgacaggattgcactgaaaaggctgtatgacacaaagattacccgatatgtcaagataaaaggtgaagcaaatccctttgaccccgaatggacagagtattttgaaaagcgtaagacttacaagatgctacagtcgctcaacggtagaaaatcattgctgtacatgtgggaaagacagaaccatttatgtcccgtatgtggtaaacccatagacaaggaacatccttggggaacttcccaacaaatagtcaatggcaagaaagtaaatttcctgctgcatgacagctgtagaagaaaagtcattcaaactaataagatgtaactatgagctggtttctattaaatagaaatttaacactgcttgagccgtatgattggaaactttcatgtacggttctgaggggggaaaggggcagtaatgcccctgacctacccggcaaggccctctcatcggcgaacatggctgaatatctgcgctatatgtataagacggtcagaaaatattacggcgaggcaatcgtggtgacgcaggaggtggacgacattatcagttctccggtggtcaaagagagcattatcaacaactcggattgtaaaatcctgcttgaccaaaggaaatatatgaacaagttcgaccagatacaggcgttgctcggactgacggaaaaggagaagtcgcagatactctccatcaacatggcgaacaacccttcacggctctacaaggaggtgtggataggcttgggcggcacgcagtcggcggtctatgccacggaggtcagcgcggaagagtatctggcgtacaccaccgaggaaacggaaaaagtggaggtttaccgtctggcggagaagctgggcgacgacatcgaagccgccatccggcagcttgccgaaaggcggagaaacaaggaataactaaaaaacagaatgtatcaaccaaaaaagaaaaacgcgtatgaatttaccaaaagtgaaaatgctgcaagtcagcaagtgccttatcggattggcggtcatgatgctgcaatcctgcgacgtggccgacaaccgccgcgacatgctgtgcgggaactgggagagcgtggagggaaaacctgacgtgcttatctacaaggagggcgaagcctacaaagtgacggtgttccgtcgtagcggtctgcgccgcaagctcaagccggaaacctatctcttgcaggaggagaacggcaacctgttcatgaacaccggcttccgcatcgacgtgtcctacaacgaggccacggatgtgctgactttctcgccaaacggggactatgtgcgggtgaagccgcagccgggacatccgaccgaagaataacaaccactaaaatccaaagtaacatgagaacaagaataacaatgattatctgcctgtgcctgcttttcgcgggcagggcaagcgcacagtgggtcgtaagcgatccgggcaatctagcgcagggcatcatcaatgcctccaaaaacatcatccatacctccaagaccgccacgaacatggtgagcaactttcaggagacggtgaaaatctatcagcagggcaagaagtattacgatgccctcaaatcggtgaacaatctggtcaaggacgcccgcaaggtgcagcagaccatcctgatggtgggcgacatcacagacatctatgtgaacagtttccaacggatgctccgtgacgggaatttcagacccgaagagctttccgcaatcgctttcggctacacgaaactgctggaggaaagcaacgaagtgttgacggaactcaggaacgtggtgaacatcaccacgctctccatgaccgacaaggagcgcatggacgtggtggaacgctgccactcgaagatgaagcgttaccgcaacctcgtgagctactacacgaacaagaacatctccgtgagttacctgcgtgcgaaaaagaagaacgacctcgaccgcatcatggggctgtacgggaacatgaacgaaagatactggtagcctatgaagttcgacaaccttcatcagattttacgttcactttatgagcagatgatgccgctgtgtggggacatggctggtgtggcgaaaggcatcgccgggctgggtgcgctgttctacgtcgcctaccgggtatggcagtcgctggcgagagctgaaccgatagacgtattcccgatgctccgtccttttgccatcggtctgtgcatcatgttcttcccgactgtggtgctgggcacgataaacagcatcctctcacccgtcgtacagggcacggcaaagatgctggaggcggaaacgctggacatgaaccgataccgggagcagaaggacaaactggaatacgaggcgatggtacgcaaccccgaaaccgcctacctcgtgtccaacgaggaatttgacaagcaactggaggaactcggctggtcgccctccgacatggtgacgatggcgggaatgtatatcgaccggggaatgtacaacatgaagaagagcatccgcgacttcttccgcgagatactcgaactgctgttccaagccgccgccctcgtgatagacaccgtccgcaccttctttctcgtggtgctggcgattctcggtccgatagccttcgccctgtcggtatgggacggtttccaaaacacgctcacgcagtggatatgccgctatatacaggtctatctgtggctaccggtatcggacatgttcagcaccatactggcgaagatacaggttctgatgctgcaaaacgacatcgagcggatgcaggcagacccgaacttctcgctggattcgagcgacggggtgtatatcgtattcctctgcatcggcatcatcggctactttaccattcccaccgttgcgggctggattatccaagccggaggcatgggcggttacggtcgcaacgtgaaccagatggcgggacgagccggaagcatggcgggcagcgtggcgggtgcagccgcaggaaacgcagtcggacgtgtcggcaaattgctgaaataatcaatgtgcaatcataaattggaaaatataaatggaattcaaatcacttagaaacatcgaatcgtcgttcaggcagatacgcctgttcggtatcgtcttcctctcgctgtgcgccgtggtgacggtgtggagcgtgtggaactcctaccgtttcgcagagaagcaacgggagaaaatctatgtgctggacaacggcaagagcctgatgctcgccttgtctcaggatttgtcgcagaaccgcccggcggaggcacgggaacatgtgcgccgtttccacgagatgttcttcacgctatcacctgaaaaaagcgcgattgaacacaacgtgaaacgtgccttgctgctggcggacaagagcgtgtaccactattattcggacttcgcggagaaggggtactacaaccgcatcatcgccgggaacatcaaccaagtgctgaaggtggacagcgtggtgtgcgacttcaacgcctatccctaccgtgccgtgacctacgccacacagaaaatcatccggcagagcaacgtcaccgagcgcagcctcgtgaccacctgccgcctgctgaacgcatcgcggtcggatgacaacccgaacggttttaccatcgagggtttcaccatcattgagaacaaggatttacagactatcaaacggtaacaggacatgaaaagtatcagaaaatcaatgtggggcatgtattggaaactccacgacaaacggaaacgcttggcggcaagtctcaaagggtatctggacggcttgccgccggaaacacgccgccgcatcgtgctggggatgttcgccgccttcgcggtgcttgccctttacaccttcggcagagccgtctatgacatcggcaggaacgacggctcacatatggaaacgggacacgccggacgggtggaactgccgaccccggcggaaacaggcaatcacttaacaccttatttatatggaacagacaaagaatgaaccgacgaaagagaacaaagctgctcccgaaacggggaaaccgaaaaaggagcgcgaaccgctgacagaggcgcaacggctgaaacggcagaagatgatcgtgctgcccgctatggtgttggtgttcatcggggcgatgtggctgatattcgccccgtcctccggcaaggagcaaccgccgggaacggacggatacaacaccgagatgcccgacgctgacaaggcgaaccggcagattatcggcgacaagctgaaagcctacgagcatggggagatggaagagcgtcaggagagccgcaaccgtgccatcgggcagctgggcgacatgttcgaccgcgagatagcgggaacggagaacggagtggacttcgacctcgccaatccgggcggcaaggaagaaagggcaaagccagccacgccgcagaccatccagtcctccgcagccgcctaccgtgacctgaacgccacgctcggaaacttctacgaccagccgaaaaacgacaatgcggagatggacgaattgttggagcgcatcgcatcgctggagtcggaactggaaagcgagaggggcaaggcttcctctatggacgagcaggtggctcttatggagaagtcctacgagctggcggcaaagtacatgagcggtcagaacggaggacagccatcggcggaacagagggcagagccaactaccgtgcagaaagggaagaagaacaaggcaatgcctatcagacaggtggagcatcaagtagtttcttcactctcacagcctatgagtaacgcggagtttgtcgccgccttatcgcaggaacgcaaccggggtttcaacacggctgtcggcacggcggaggtattggacaggaacaccataccggcgtgcgtgcatggggcgcagagcgtgacggacgggcagacggtaaggctgcgcctgctggagcctatggcggtggcaggcaggacaataccccggggtgcggtggtggtcggcacgggcaagatacagggtgagcggctcgacatcgagattacctcgctggaatacgacggcacgattatccccgtggagcttgcggtctatgacacggacggacagcccggcatcttcatcccgaactcgatggagatgaacgccgtccgggaggtcgccgccaacatgggcggctcgctgggaagcagcatcaacatctccaccaatgccggggcgcagctcgcctccgacttgggcaaggggctgatacaaggcacgagccagtacatcgccaaaaagatgcgaaccgtcaaggtgcatctgaaagccgggtacagggtcatgctttaccaagaaaaatattgaaaacaataaaaattaccactaaaatccaaaagtaatgagaaaagtaatcatcatgtttgccctcgctatgggcatcataactgccaacgcgcaggagaatgtaaccgttgaaacgaccaacggaagtgaacaaccgaccttgacgaaggaggtctatccgcagaaggaggcggacggcgacctatatcacgggctgtcacgcaagctgaccttcgaccgcatgataccgccgcacggtctggaagtgacctacgacaagaccgtccacgtcatttttccggcggaggtgcgctatgtcgatttaggctcgcccgacctgattgccgggaaagccgacggagcggagaacatcatccgtgtgaaggctaccgtaaggaattttcccaacgaaacgaatatgtccgtcatcacggaggacggcagtttctacaccttcaacgtgaagtacgccgccgaaccgctgttgctcaacgtggagatgtgcgacttcatccatgacggcagcacggtgaaccgcccgaacaacgcgcaggaaatctatctgaaagagctgggcagcgaaagcccgatgctggtgcgccttatcatgaagtccatccacaaacagaacaagcgcgaggtgaagcatatcggctgcaagcgtttcggcatccaatacctgttgaaaggcatctacacgcacaacggcttgctttatttccacacggagataaagaaccagagcaacgtgcctttcgatgtggactacatcacttggaaaatcgtggacaagaaggttgcgaagcgtactgccgtgcaggagcagattattctgccgctccgcgcgcagaactacgccaccctcgtgccgggcaaaaagagcgagcgcacggtcttcacgatggcgaagttcaccatccccgatgacaagtgcctcgtggtggaattgaacgagaagaacggcggccgtcaccagtccttcgtgattgagaacgaggatttggtacgcgcgggtaccatcaacgaacttcaagtacgctgaccatgagaaagtacatcgcaataatcatcgcgtcgcttgccctttttacagggcaggcgcacgcccagcggtgtctgccgaagatgcagggcatcgaggtgagggcggacatggcggacggcttcaatctcggcggcaaggacggcgggtacagcttcggggcggctctctccacctacacgaagaaggggaacaagtgggtgttcggtggcgaatacctgttgaagaacaatccctacaaggacaccaagatacccgtggcgcagttcacggcggagggcggctattacttcaagatactgtcggacgcccgaaagattgttttcgtctatgccggggcttcggctctcgccggatatgaggcggtaaattgggggaagaaggtgctgcatgacggctccacgctgcacgaccgggacgccttcatctacggcggtgcgctgacgctcgatgtggagtgttacgtggcagaccgtatcgccctgcttgccaacctgcgggagcgttgcctttggggtggcgacacacggaagttccacacgcagttcggggtcggtatcaagttcatcatcaactgacacgggcatggaaaggacggaaatagatgctgtcagaaggatgccgcttgcggattttctcgcacggctggggcatgagcctgtcagaaggagcggtaacgagctgtggtatcttgccccgtacaggggcgagcgcacatcctctttccgtgtgaacgtggcgaaacagctctggtacgacttcggtttgggcaagggcggcgacatcttcacgcttgccggggagtttctgcaaagcgatgacttcatgaagcaagcgaagttcatagcggaagccgccaatatgacggttgccggatgggaaaagcccgtctatctctcgaagccgaccgaatccgtttttgaggatgtggaggtcgctccgctgctccgctcactgctgacggagtatttagaggaacggggcatcccttacgccatcgcatcccgtcactgctgccgcttgaactacggtgtgcgtgggaaacggtattttgccgttggctttccgaacatggcaggtggctatgaagtcagaagccgatatttcaagggttgcatacctccgaagtctgtatcactggtaaaggcgaatgacatcccggctgacgagtgcctcgtgttcgagggcttcatggactttctctctgccgtgacgcttggtgtaaccggtaacgctgactgtcttgtgctgaactcagtcgccaacgtggagaaggcggcgggattgctggacggatacgggcgcatcggctgcttcctcgaccgtgacgaagccggacggcggacgcttgccgcacttaccatgcgatacggggaacgtgtcaccgaccgttcctccctctatgacggttgcaaggacttgaacgagtacctgcaactgacaacgaaaaaacagaaaaacaaccatctaaaaatcgaagaacaatgaacatactgaacaacagaaacaagagaacatcaatattcaaggcagtggcgttatgcctgatagccgccatgtcattcaccctcgtgtcatgtgacgatgacatggacatccagcagtcctatcccttcacggtggaggtcatgcccgtgccgaacaaggtagtaaaggggcagacagtggaaatccgctgtgaactgaaaaaggagggcgacttttcgggtacgctctataccatccgctatttccagttcgagggggaaggctcgctcaaaatggataacggcatcaccttcctgcctaacgaccgctacctgctggagaacgaaaaattccgcctgtactacacggcggcgggtgatgaggcgcataatttcatcgtggtggtggaggataactttagcaactcctacgaactggaatttgacttcaacaacaggaatgtaaaggacgacgatcttaccatcgttcccatcggcaacttcagccccttgttgaaatgatgcgtgtattcatgacaatgctctgttcacttctgacggtctgttctgtgtccgcgcagatcagccgccaagagggaacggacgggcaggcggcaatctaccgactgccgcttatggaacgtgcttttttatgctgccgctactttgaaggctggcactcagaaaaacactacccatacgtcggttggggtcacaaacttttgccaaacgagaagtattcggcacgaaccatgacaaaacgggatgcggatgaacttttgcggaaagacctgcgcaaatttgtcgccatgttccgtaaattcggggttgattcgattttgcttggcacgttagcttacaatgtgggaccggcgaagctgttaggcagcaaaacaatccccaaaagcaccttaatcaagaagctggaagctggtgacaggaacatctaccgtgagtatatagccttctgcaactacaaaggaaaacgccacgccatgctgctcaaacggagaaaggcggagtttgcgctgttgtatatcccataaaaggactgacaaaactggcaaaagacgtgccatatttaacttggcacgtcttttgctctatcacttgatagattatcgtaggattttctcgttaattgacatcgttgagccatttttgcctatcggtttccaaataacacttcaagttgtaagtgttgtgagagcaatacaaaacatagttattaaccataaaaagtatagcgaaattatgaagaaagtatttaggaaaattcagaaaggaacaacaaaaatgattgaacgtatcaaatcgttgggggaaatggagacgaagcagaaatgtgtagttcaacggttcgagattatcattcccctccaccaaaaaataacgacccaatatatagcctccgcaagttttacttgcggattttttagttatcgcagattggacaaaggtttctttgctactttctttgtccgccatcatgctcactgaaagaaagtagggcggctctcgccgccccgccactcaaaagcgtgtgtaaagtcccgtcaccatcgtgaacatttcctccagcatatcaaaatagataccctcgtgtacggcaatgtcctttgtcttgcactcaaaggtctttttgctgaacgtcctgcggtagaagcgcatattgtagaggtctgccccttcgtcatagatgatgtcaaggcggttggcacttgttttgttccttgcaaggctcatccgtaagccgttgcccatatctatgaaatcacggctacctgtcatggcggtgaagcgttttccgcctatctgctgtaatatcgtcttggctatcatatcttttgtttttagggttttaagtattggcggtgcggacaccgccatcccgttcaaaattctcgcatttcggaaatgggggtctgccgttgtagccactctttcacacattccatattgtactcgctcgtgatgactgccgtatggctgtcggtggcggtgaaacgtgtgctttcgtaatcatctatccaccccttgagggtgtccgttccccacgctccggtatcgtcaaagataccgtccaatgccgtgataggttcgctgaacttgactatcagcgtttgataggtcgtgttcatagtctgtcctcctttcccttctttgcgttcagccacttgtcccgtgcggctcggcactcgtccaacgtgggtttgacacaagagaacaattctctgtctatggggtggcggtagtcgtactgcacaagtgtccgcctgcgtcttccgatacccgattggaaacgctcgtatttctccgtacctgcttccgcgcaggtgcttactccgttgatggtcattcgtgttgtcataatgttgctttttagatggttaaaaatgtactgacagaactctgttcttcatcaccatttcggggttgcttgtgtagcgttggtgcaggtagaaatggtgtgagccgaagccgtaaaggaaaaacttgtcaagttcgtgcttctcggcaaactcctttacgctctttctcaattccccctcactcgttgtgagagtgaggaggttcacaaattcaaggaacatcgtggggattgcatcatcccacacacaaatcatactttcaattcttacttccatatcaatgttgttttaggggttatgctatgccgctttcatccgctcacggataaggttggcgttcttgttcacaaggtctatgatgcgctcgtgatattcggtgtcctggttgtgcttgccgtggcactgcaccacttcgagggttcgcaagtccacctctacggtttcaataatctcatcgccaatccttgccgatagtatgagggtgtcggctttcttgtagtatccactgccaaacacgcagatgccctgcgtcttgccctcgttgtaatactcgtctatgctttcaagcaccttgacgattatttcctcgtccgtgattaccaagccgaagaatttggatttgttggcgatgaaatcctccgcatctttctttcgttggagttgtcgctgttgctcacgctcacgcctttcaatctcccaacggcgttgctctgcggctctttccttctcgtgtatggcttcaatttttcgggttgcgttgtcgtgtgccgccatgaaatcttcgggacagatgttcttcgggttacggaggtcttgaccgagttttttgagcatacgcagatagtcgcaccacattgagaggttgtctatctgatacttgtgacgcttggcaatcagatatgatgcccaacattcatcggcagtacgggtattgaaaagaaagtgtttcatgacctcaatctcaccgcctttcataagggtttcaattcttgggtctgaaagcaaggctttgaaaagacgcacgggggagatgccgtggaaatcgcccttgaagccgttacgtctgagttggggcaatatcctcatctttggatatgcacagcttcttgccaccacatcatcgtataggctgttgtgcggtcttacctccatatcgctgcctaatgcccacacatcgcaatagcagaaaaggaagccacggagcaacgccatgtccgtaaccttgccgtcgggtgaaatccaacgctgcacgacctcgtggcagtagaaacgcatcggttcgcctttcctgctctcgcatctgacctgcgccacgcggattacctgataccctttgcaggtggttatcacgctgaaattctgcgtttccttgtagatgcgtctgcgtgtgtcctgcactttgagttcggcatggcatttggggcaggtgcagccttcaagggtgtcgcatagtccgctgtcgctgtgccactcgtgaccgcagtcggaacaggtgatgttccctttcttggtgcggtagccgatatgctcaacgcagtggcggtatgcccaatctatttgtgtcgctgatatggggcgaaggttggcggaaagtcttgccacctctttctgtatcttggtcttcggtttcataagcctaaatcaaataatgagggttggggttggttttcttttctcgctgacggtctgtggcggttctgcaacttgcggagttcctcctcttggtatttgcggacagcgttctgacgtgcctccgccttttcctctgccgtgagtttcacaacgtggttcacaaccacttggcagtccatcggtttgcccacctctatctcgttttcctcatagtagtggatggcttgcccgaatatctctccgtccgtgaaaccgttgcaaccgcttttctgcacatagttcagaatgtgggtcacgcactcgtccatgttcttggcagggttgcggtacttctttgcaaatagcgcatcttcctccgcacgctgttccaagtacatatatatcgttctcttgaaatggtctgttcctttcatatcgctgtcatttttagattatctgtttcagtatctctctccaataggtcggctctacctcgctgagaaggaagtccatgaaatccctccgtgcgtccttgttcagttcgtggtacaatcttcggaaagtttcaaaattgccgttgatgtacgtttccaccatatacacgaagatgttgtccacctcgtaatatctgcactgctgcgctgccgtcttgctgtttctttttgccatgtcggtaagggttaaagggtgaataaccaaaggatgaagccaaagaaggcaatggtggaaaggatagccacgattacacctatcgccactcggaacactccgtttacaatctctctgatgatgccccaaaggatgccgaacaccccgaaggcggtgcgcatcatcaagccgcatatcgccaacccgatgtgttgcgccatttgtctgaaatttgccgttgccgtcatatcttcgctgtttttgatttttttgtttttaatgcggattcaagagctgagggagttgagtttcaaactatcttatctgcctctcgtttatccgacattttttttatgcgtctttctgtcgcatcggtcgttttcgtttcgggtgcttgaaaaggtagggattagggaatgcaaggtttttcggtcaaaatactacccgcagggctggagatttttaccgaaaacaggaggcttgaccttgctttcccgtccaatcccggaattacctttgcgcccagaacgaaaatgactgactgatgcggcttactgaaaggcgcaaaatggaggtaaacgaaaacagaggcagattgtgtagaaaaaaacttcaggggaaaatccgtaaaaaaaagaatcaccaaaaggaaaaagacatcaccggaagcgtgaaaagggcaaaccacaacaaaggaagtatgattgtttccgatccgacggaacttgttcagccgggtggcaacaatcattcttcccggtttgtccggctgtgtgtgggcgcctgtttcattcatggggcaggctgacacactctgcattcactttccgcttccggcaaaagagacagcgaaaaaagaaaaatcatttgaaaacccgtaaaagcacctcttggcataggcgcaaaagaaaggggcattgcttcatctgtctaaacatcgtttaggcgtgaggcaatgcccttttctccagctatgcggtagtcggcacacgtttgttccaaactcgttttgggcaatggtgtgccgacggacaataccgcttttacggaaaattcttatgaatgaggggataaaaaacgggagtttatatcaaaatctcgaattaaatagctacttttgcatacgaagagttctttgaaggttacgcaacgcgcagaaggataatgcagtagataactaactaaatcgtaacctattactatcaagagcaattaacctacgctcatttccaataaattacactcttttcgtaacttcttaatacaaatatagaaaaaaagtaataacttccacctttattccattttcattttcagaggacgatatttctccaaaaaacattattttcaagagcaccccttattttttagaggtatatcttcaaaaaacatataaaaaaagcaagattaccccctaaaaagtagggggtaattcagaaaaaacatataattttgcgcccaacaaccaataaaagaagagactaatatgtcaaaaatgagattttttgctttgcaagagctcgccaatcgccgccctcttgaagtcatcactccttcaaacaagttgtccgattattacggcagccatgttttcgaccgtaaaaagatgcaggaatacctgcccaaagaagcctacaaagctgtaacagacgccattgaaaaaggaactcccatcaacagggaaatggccgatttaatagcaaacggcatgaaaagctgggcaaaatccctgaacgttacccactacacccactggttccaacctctgacagacggtacagccgaaaagcatgacggcttcatcgaattcggagaagacggagatgtcattgaacgcttttccggaaagctgcttatccaacaggaaccggatgcttcttctttccccaacggtggtatccgcaacacattcgaggcacgcggatatacggcatgggatgtttcttcaccggcttttgtcgtagacaccacgctctgtatcccaacaatcttcatctcctacacaggcgaggcgctggactataagacacctctgctcaaggctcttgcagctgtggacaaagccgcaacggatgtctgccagcttttcgacaaaaacatagcacgcgtatatacgaacttgggctgggaacaggaatacttcctcgtcgacctggcgctctataacgcacgtcccgacttatgcctgacaggacgtacactcatggggcactcttctgccaaagaccagcagttggaagaccattatttcggctctatcccgccacgtgtcactgcctttatgaaagaattggaaatagagtgtcacaaactgggcattcccgtcaagacgcgccacaacgaagttgcccccaaccagtttgaactggcccccatcttcgagaacgccaatcttgccaacgaccacaaccagctggttatggatttgatgaaacgcatcgcacgcaaacacaactttgccgtgctgttgcatgaaaagccatacagcggcgtgaacggttcgggcaagcacaacaactggtcgctctgcaccgatacgggaataaacctttttgctccgggaaaaaatccgaaaggcaacatgctgtttctcacattccttgtgaatgtactgatgatggtatacaaaaaccaggacttgctccgcgcttccattgcaagtgccggaaacagctaccgcttaggcgccaatgaggctccccctgccattttatccatattcctgggcaagcagttatcttccatcctcgatgagatagcccgtcaggtaagcaacagtaagatgacagccgaggaaaagactacgctaaagttaggtatcggacgtatccctgagattctgctggacacgacagaccgcaaccgcacctctcctttcgctttcacgggaaaccgttttgagttccgcgccgccggttcatcagccaactgtgctgcggcaatgattgccatcaatgcggcaatggccaaccaactgaacgaattcaaagtatccattgagaagctcatggaagagggtgtcggcaaggacgaagccattttccgcattctgaaagaaacaatcatcgcctcggaacccatccgttttgaaggagacggctattccgaacaatggaaacaggaagctgccaaacgcggactgaccaatatctgccatgtgccggaagccttgatgcgttatatggacaaccaggcacgttccgtactcatcggcgaacgcatcttcaacgaaacggagctggcctgccgtcttgaagtggaactggaaaagtacacaatgaaagtacagattgaaagccgcgttttaggtgatcttgccatcaaccatatcgtaccgactgccgttatctaccagaaccgtttgctggaaaacctgcgtggactgcgcgaaactttcactccggaagagtatgaaatactcagcgctgaccgcaaggaactgatacgtgaaatctcccaccgcgtaacagccatcaaaatgcaggtacgtgaaatgacggaagcccgcaaggttgccaaccacatggacaattacaaagacaaggcctttgcatacgaagaaacagtacgcccctacctggaaagcatccgcgagcatatcgacaatcttgaaatggaaatagatgatgagatatggccgttgccgaagtacagggaactgctgttcaccaaatgataaatgaacggctttgctgataaaccgacttcaaattatgaatgatgaacctgccgcattgtcatgccaaacggtaattcatcattcataatttaaaattcctttcccccttccttgcacttttttgatacaaatgtgtcatttttaattttttctttttacatttgtgctgtacaacacagttttgcagcatttatggtaaaaataaatttatccgatattaatgttccggagttgattcccgatatatggtcacctctgaatgaagaacagcgagagtttcttgccaaccattttacgcttcagaattataagaagaacgaaattatccattgtgaaggcgagacacctacttgcctgatgtgtctgctgaatggaaaagtcaaaatctataaagacggtgtgggcggaagaagccagattatccgtatgatcaagcccactgagtatttcggatatcgcccttattttgccaaagcggattatgtaaccgctgcctgtgcatttgaaccgtcattggtctgcctgatacccatgactgccataatgacattactatcgcaaaacaatgaactggcgatgttctttatcagacgactgtccattgacctcggtatcgccgacgaacgtacggtgaacctcacccaaaagcatatccgcggccgtctggcagaatcgcttattttcctcaaagaaagctatggcctggaagaggacggttctactttaagtatctacctgtcccgtgaagatttagccaacctttccaatatgacaacatccaatgctatccgcaccctctcacaatttgctgcggaacgcctgattaccattgacggaagaaaaatcaaaattatcgacgaggaaaagctgaagaagataagtaagataggataaacttctaaaattaaaaattgagaataaaaaaatagggctgcgcggtgtttgttatacaacacttgtattgcgcagccctatttttttattctcaattcccaatttttaatttaacaagaatctttccgcctcaatcgctgccatacatcctgtagctgccgctgtgatggcctgacggtaatgagggtcggcaacatctcccgctgcaaacactccgggaacctttgtacggggagtaccgggatctgtcagtatatagcccgtttcgtcggtgtcgacatacggtttgaaaatatcggaattaggcttatggccgatagccaggaaaaagccgtcgatagccaggtcataacgctgttcgtccgcttcacccatacgcttcaccaagtgtacgccttccacaccgttatctccatataatcctactgcattgtgttcaaacaaaacttctattttctcattctccattacacgcttctgcataatcttggaagcacgcaagaacggtttacgcacaatcaggtacactttgcttgccagacccgccagataagaggcttcctcacatgccgtatcgccgccgccaactaccgctacgaccttcttccgatagaagaaaccgtcacaggtagcacaggcgctgacacccatgccggcatatttcttctcgtcttccagtcctaaatacttggcagcagcaccggtagcaataataacggtttgcgcttcaatgaccttttcttcatcaatggttatcttatagggagacttactcaaatcggcagccgtagccacgccgaaacgcaagtccgcaccgaagcgttcagcctgtttgcgcaaatcctccatcatctgcgtaccgctgataccttccggataaccgggaaaattctcgatatcggtggtggtggtcaactgtccgccgggttgaagcccctcataaagcaccggagaaagattggcacgtgcagcatagatagctgcggtatatccggcaggaccggaacctataattaaacactttactttttctgcttccatattattcttttttattagtaacgtttatcatcttaaatcaaccagttcggctgtaggatatgctttcctgtcaaacacaaaaaggctgtcatcatagttcttgcccgtctgataggaatttatgaacactactgccgcatctttgctgccccgctgaaccatactcagttttaacgggcggaacgaacctttttctatatacaggataatacattgcatatcctggctgcgtttggtagcgttcatcaccactttatacgccgtatcatccgaagcattgccggttttagccactttcagcttataatcctgcttatagagcgacaaccacgaataaggattgatgctctgcaactcttcgggagtgggttcggaaacattaacctcatcgctcgaagcaagataactccactgtgtgcgtccgtcgaaccatgtcgtcactccttccgtctccagcagaaatttatcgcctttcaaacggatggaaccgttcgtattgccttcaggtgcacggacggaaaaagtgattttgatcccaccttccctgcggaaagcatctgccgcacggtcaagtatatctctggcatccggctgctgtgcaaccgtagggatagtcaggaaaagcatccagactgtgaataaaagactgttgattttcatgtacttcaaacgttgatttgttacaaattgttcaaacgcgtttccaagtccgttatatccacgcagaacacctcacgcgctttactgccttgcgccggacctacaatcccggctttctccaactggtccataatacgccccgcacggttataaccgatggcaaatttacgctggataagcgaagtggaaccttgctgctgatacactatcagccgggcggcatcttcaaacagcgggtcaagacgtcccatatccacatcgcccaaatcgccgtttgcattttcatccacatactcaggcaggtagaatgcagtgggatacccctgctgacgggctatgaacttcgttatctccgccacttccggcgtatcgataaacgcgcactgcacacgaaccgggtccgcaccttgcaggaacagcatatcgccgcgaccgatcaactggttggctcccggccggtcgagaatggtacgggaatccaccatagccgacacccggaaagcgatacgtgccgggaagttggccttaatcgtacccgtaatgatattcgtcgtaggacgctgggtagcgataatcatgtgtatacctacggcacgcgccaactgggcgatacgggcaataggcagttccacatccttaccggctgtcataatcaaatcgccgaactcatcaatcaccaccacgatatacggcatgaacttatgtcccttttccggattcaggcggcggttgataaacttctcgttgtattctttgatattacgcacatgcgcagccttcagcaggtcgtaacgggtgtccatttcgatacagatagagttcaaagtctgtacaaccttggtaacatccgttataatggcatcctcaccgtcgggcagcttggcaaggaaatgatgttctatcaccgaatagatgctgaactccactttcttcgggtccaccagcacgaacttcagttccgcgggatgcttcttatagagcagggaagtaatgatggcattcaacccgacagacttaccctgaccggtagcacccgccacgagcacgtggggcattttacacaaatccaccataaagacctcattggtaatggtcttacccaatgcaataggcaggtcgtacgtagactcctgaaacttcttactgccgatgatgctctggcccgagacaatcttcggattggaattaggcacttcaataccgattgttccctttcccggtatcggagcaatgatacggatgcccagcgcggaaaggctgagtgcgatatcatcttccagaccgcgtatcttggagatacggacaccctgttccggcgtaatctcatacagcgtcaccgtagggcccaccgtagctttaatggtactgatttcgataccgaagctgcgcagcgtattgataatcttatccttattggcattctgctctgccatatcgatggtcggttcggcattgtcataatgcttcatcaggtcaatggtcggataatgatagttttccaagtcaagacaagggttatacggctctatttccggaccgcgatactcttcatcctccactgtctccacctcaaagacaggacctttttcctcttgccgtcccgatgccggaatggcagaaacggtatcggacggcggagtctcaatcgtcataagcacttcgtcttcttctttttctttggcaagtgaggctttatgcgttgcggcatctcccaggtcgagcattatctcatgagcatcctcatccttctcttcttttccggcttcttccggagccttcgtttcttcttctcttcccgcatcagaagccgcttccgccattaccggcgatttcttcccctttacagtccaggaatctgtaaactcttccggagcttcaccggatttgcgttccgccttttctttatgtttcaggaaactgagactgaaaagttttctcaaccagataacggtacgtgcactcagataaataaggaagcatatggcagtaaccagcagtatcatccataaccccggcactcccacttgagataccagccagttgctgacattatatccgtgcatgccgcccagatagaggaaagagtccttatattggtccacaaatacgaacccgaagaatatcgaaaaccaaatcagcagcagggagcatcctatgaaccacttccacaaacgtaccacgcggacacgcatcagctttaatccggctacagccagaaacaccaagatgaaaaaggaagagatgccgaagcaatcgtttatcaaataactggcaagctgcgccccacgcgaaccagcatagttcttcacgccgttatgcgtggaaatcagttcctgcgcattacccgaatctataatactctggtctgccgcccccgtaaagaagaaagacgaaaaggccagcagcagataaaccgaaaagattaccagtatcagaccggcaacaaaatgaacggtttcattctttaagacagcagctgcctttccgaaaaaagagatagagtgttccgtatctttggttgtattttttttgaccataatgtattctgctaatatccgtacaatgacgcaaaagtaacaaaaaaaagcttatgcagtaatgctttcaaacctttttcgtacctttgcgtttcaaatcaagaagatatgaaaaaagaaagtcaagtgatattcgaccgcaatgtcgtggaattcgtaaccgtagctgccgagttctgcaagtttctggaacagacggaaaccatgaagcgttccgtcttcgtcgatacatccttaaagatacttcccctgctttatctcaaggcatccatgcttcccaaatgcgaaacgataggcgatgaagccctcgaaacattcgtaacagaggaaacttacgaaatactccgcatgaacctggccggtattcttgccgaaaaggatgattacctggatgtatttgtatcggatatgaagtacagcgaccagcccatcaccaaaaacatttccgaggatctggccgacatctaccaggacatcagagactttattttcgtattccagctgggactcaacgagacgatgaacgattcactcgccgcctgccaggaacacttcgccctatactggggccaaaagctggtgaacaccctgcgtgccctgcacgacgtgaagtacaaccaaccggatgaggaagaggaaaacgaggaagcggaggaagatgaataaactttaagctatgattatcagaagaagtataaataaagaagaagtaaaggacatgccgaaagccgtcttccccggacagatacatgttgtccagactcctcaagaggcagagcgtgctgtggcttatctgaaaaaatgctccatactgggtatcgacagcgaaacgcgtccgtcattcaccaaagggcagtcgcataaggtggctttattgcagatttcgtcggaagagcattgtttccttttccgcctcaatctcaccggacttacccttccggttatcacgttgctcgaaacccccgccgtaaccaaagtcggcctttccctgcgcgacgacttcatgatgctgcacaaacgtgctccgtttgaacagcgcggttgcatcgagctgcaggaatatgtccgcacgttcggcattcaggacagaagccttcaaaagatatatgccatccttttcggagaaaagatttcaaagagccagcgcctgtccaactgggaagccgatgtgctgacaccgtcccaacaacaatacgcagctaccgacgcatgggcctgcctgaacatatacaaccggctgcaggagctgaagcgtaccggtgattttgaactggcaatcgaagaaagttgccacacaaccacattataacgttaccacatcttaattataattatgtataaagtatatctaaagccaggtaaggaagaatcattaaaacgttttcacccctgggtgttttcaggtgccatcgcacatttcgacggagagccggaggaaggggaagttgttgaaatctatacatccaaaaaagagttcatagccaaaggacatttccaaatcggcagcattgccgtccgtgtactcagcttctgccgggacgaggctatcgatgccggcttctggaaacgcaaactcagcatagcttacgatatgcgacgcagcatcggcatagccggaaatcccaccaacaatacttaccgtctggtacacggcgagggcgacaacctgccggggctcgtgattgacatctatgcccgcacagccgtgatgcaggcacattccgccggtatgcacctcgaccgcatggcgatagccgatgcactgaccgaggtgatgggcgaccaaatagacaatatatactataaatccgagacgacactccccttcaaagccgacctctatcctgaaaacggtttcctgaaagggggaagcgcggataacatcgccatggaatacggtctgaaattccatatcgactggctgaaaggccagaaaaccggtttctttgtagaccagcgcgagaaccgttcactgctggagcgctatgccaacggccgcagtgtgctgaacatgttctgctataccggcggtttttcggtttacgccatgcgcggcaatgccacactggtacattccgtagacagctcggccaaggccatcgacctgaccaacaagaatatcgaattgaactttcccggcgacaaccgtcatgcagcctatgcagaggatgcctttaaataccttgaccgcatgggcgaccaatacgaccttatcattctggacccgccggcatttgccaagcaccgcgatgccctgcgcaacgccctgcaaggctatcggaaactcaacgtcaaagctttcgagaaaatcaaaccgggaggcatacttttcacattctcctgttcgcaggccgtcagcaaagagaatttccgcactgccgtattcaccgccgctgccatgtccggccgcagcgtgcgcatcctgcaccagttgacgcagcccgccgaccacccggtaagcatctatcaccccgaaggcgaatacctgaaaggacttgtgctatacgtggaataagcaggaaccggcttctgtacaggaaggacagaaaaagcccttcatgtactaaacattgttaatatactaaagaaaacaagcaaaacattatgttttataacataaatccctttatctttgcaccgtgtttttcatggtattagatttaaggttaataaagattggctgtctgggatagatagccttcttttttttatacctcccgccttccctttttttgatgctttatacatcgccttttccgataatttgtctacatttgcgttttattaattagttcaacttcgaaagacacgttaatttatagaaagcattatgagcatcaagattcgcttaatcattatgaatttcctacagtttgccgtgtggggagcatacctcacatcaatgggcagttacctggtaaacgtaggcctgcacgagcacatcggtatgttttacgccatgcagggaatcgtatcgttgtttatgcctgccgttctcggcatcattgccgaccgctggataccggcacaaaagctgttaagcttcagtcacttcaccgcagccctgttcatggccgcagccggatactacggcatgacgaaaggtgctgaggtagatttcggtactctgttcacactttactcgctaagcgttgctttctatatgcctacattggcattgtcgaactccgtggcctacaccgcactcgacaaagccggactggataccatcaggacattccctcccatacgtattttcggcacaatcggattcatttgctccatgtgggtggtggacctgctcggactgcaaaataattacgggcagttctttgcctgcgccatcatcggagtagcgtatggcgtatatgcgctgaccctgccggaatgccccaccagcaagggcgacaatgccaaatcattggtagaggcattgggcttacgcgcctttacgctattcaagcagaagaaaatggctgttttcttcattttctccatgctgctgggcgtttccttgcagattaccaacggatttgccaatccctacatcagcagtttcggcagtattcccgaatatgccggcactttcggagtgcaacatgccaacatcctgatttcgctgtcgcaaatatccgaaacactctgcatcctgctgatacctttcttcctgaaacgcttcggcatcaagcaggtgatgctgattgccatgctggcatgggtattgcgcttcgggctcttcggcatgggcaatcccggaagcggcgtatggatgtttgtactttccatgattgtgtacggtgtggcattcgatttcttcaacatatccggttcgctgtttgttgacagagagaccgaccggggcatccgttccagcgcacagggactgttcgttatcatgacaaacggtttcggtgccactatcggcacactgggtgcacaggcggtagtgaatcactttgtagatttcaacagcaatgtcccgcagatagcgcaatggcaatcagcatggtacgtatttgcaatctacgcgctgaccgtagcagtggtgtttgccatcgtattcaagtacaaacaccatccggaagatttaaagtaactacagccgatgaacaaaaaaaagattgagctgcaagtattgaatatctcaaacagccaggcacaggccggcgcttatgccatggtgctgggcgagataaacggcatgcggcaactgccggttatcataggcagtgccgaggcacaatccatgatgattgaaatgagaggcatcgttcctccccggccgctgacgcatacgctgtttgcctcagttctcaaggtactgggggcaaccttgctgcgcgtgcttatttacaaagtggacaacggtgttttctattcttacctctatatgaaaacggaagagaccatcctgcgcatcgacgcacgtaccagcgatgccgtggccctcgccttgcgcatggatgcccccattttcatatacgatgatattttagaagccgaatgcctgaaaacagagcacagcatcactcccacccaacagacggatgatgccgccgcagatgccgctacacagaaaaagaccctgaaacaattaaaggaagcccttcaaaacgccatagacgcagaagactacgaacgggctgcacaactaagggatattatcaaccagcataagaaaccataaacaatcatgcacgtattctacacccccgacatacaatcgcaagccgaactgcccgaagaagaagccgctcacgcagtccgcgtactgcggctgcaaacaggcgacgaggtaacgctgaccgacggcaaaggcaacttctaccgtgcggaaatcagtaccgccacgaccaagcgttgccttgtcaacatactcgaaaccatcccccaagcgcctttatggagcggacacctgcacattgcaatggctcccaccaagaatatggaccgcacggaatggtttgcagagaaagccaccgaaataggctttgacgaactgactttcctgaactgccgtttttccgaacgtaaaataatcaaaacggagcgcattgccaagatactggtatccgccatcaagcagtcgctgaaagcacgcctgccccgcctgaacggaatgaccgacttcaaccggttcatcagccagcctttcgaaggccgtaaattcatcgcgcattgttacgaaggagaaaaacctttattgaaagatgttgtccgtaaaggagaagacgcgctggtgcttatcggaccggaaggcgacttcagtgaagaagaggtgaaacaggccattgaaaacggattcgagcccatcagcctcggccgttcccgactgcgcactgaaacggcggcactcgtagcctgccacatattgaatctacaaaaccaataatacgatatgagaaagagtatttccttctatttgctgccggttttattaacagtgctatgcctgagctcatgcagcgaaaccgggcaaaaaacagaatacacgcatgtaatccccgccaatgccacagaagtggcggcactcgacctaaaaagcatcgtcgataaagccggattgaatacctcagacagccgggccaccttgcagaagttcctggggctgctccttgaaggcgggagcgccaacctgaaacaagaagcggaaactcttctgaaagaccctgccgaaagcgggatagactggaacgccccgctctacgtattcgaagcccctacgctgcacaacacggcaatcaccctgaaaattgccgatttaaagaagtttgaagccatgctccggctgcttgtccaggaacagttgtgcaccgccccggtcgaggccggcggttaccggagcgttgaaataaaagacgcaggagtactgcttgcctacaacgacggcactctgctgggagtttacggcggcagtacggaacagttgaagaagctgcaacccgccatcaccgccctcatgcaacaacctgccgacaaaagcatccgcaccggcaaatacttcgccccgatgatgcagcaaaaaggagacatacgcctgctggcaactcccgatgccctccccatggacgttcgcggtgtactgacctggccgcacggcacgcaactgttgggttatgtcctgtttgaaaacggacgtatatacgctaccctgcaaaacgccgatttcaaaggaaataccaaagaaagcaaccagcctttccaccctcaaaattcgcgggagctgcaacaggccatgctgaacatgatgcacggacgagccttcaacatttcattgaccagcaacgaattgcttactttaagcaacctgcgggtgcttatggaatatgctccgaacgaaccggaagtcaacatcctctatcaactgattatgaaaatagaagagctgaacctgcggggagacaagaaccggaccaactttacggtcgttctgaacgaaaagaacgagaacgccctgaaacagcttaccgactttgccaagttgttcatagggatgtaaccggcagccggcattcagcgattcatattcagcacgcaatgcgtaatttgtaaatcataagtaatggaccacattcatttacagcataccctgccccaggtctttgccgcccgtgacaccgtcatttcacaggtgtggcatcaggacatcgtgttcgacaaaggaaagcgctatctgatagaggcttcctccggcaccggaaaatcctccttgtgcagctatatctacgggtatcggcgcgactatcagggcatcatcagtttcgacggacgcaacatccgctcattctccgtcggcgaatgggcagatgtaaggaaacattcgctcagcatccttttccaggaactgcgtatcttccccgagctgaccgcccttgagaacgtcttgttaaagaaccgcctgaccaaccataagaagaaaaaagaaattctcgcccttttcgaagcaaccggcattcccgacaaaaccgacgaaagagccggcaagctttccttcgggcagcagcaacgcgtcgcttttatccgcagcctttgccagccgttcgactttatcttcctggacgaacccatcagccacctggacaacgacaacagtgccataatgagccggttgctcatggaagaggcgggcaagcagggagcaggcattattgtcacatccatcgggaagcacctggagctcgaatacgatgaaaccttccgcctataacgcataaaccattatccgcaccatgaacagacttgtttggaaacttctccgccaacatatcagtataggccagttgaccggctttttcctcgccaacctcttcggcatgctgattgtattactgagcgtacaattctaccgggatgtactccccgttttcacgcagggagacagcttcatgaaaaagaattatatcatcgccacaaagaaaatcagcgcactcggcagttttaccggaagaagcaacaccttctcccccaaggaaatcgaagagatgaaagaacagtctttcaccgaaagcgtgggcgccttcaccccttccttgtttaaagtatccgcaggcttaggcatgcaggaagccggaatacatctttccaccgaaatgtttttcgagtccgtacccgacgaatatgtagatgtcagcctggataactggcattttgacgagtccgcccaagtcattcccatcatcattccccgcaattacctgaatctgtataacttcggatttgcacaaagccgtaacctgccgaaactctccgaaggcctcatgagcctgatacagatggacatcatgctacggggcaacggacgtgcagagcagttcaaaggtaagattgtagggttctccaaccgcctgaatacaattcttgttccccaggcattcatggactgggcaaaccaacgtttcgcccccggcaaagaagcccggccttcccgcctcatcgtcgaggtaaagaatcctgccgacacagccgtcagcgactatttccaacagcagcactatgaacccgaaggcgacggactggatgccggaaaaacgacgcatttcctgcgcctcatcaccggtatcgtcatgggagtaggattattcatcagcattttatccttttatatcctgatgttaagcatcttcctgctgttgcaaaagaataccgtaaaattggaaaatctgcttctgataggctatagccccaatcgtgtggcgcttccctacaatatcctgacctgcggcttgaatctggcggtactggtattgtctgtcggcggagtggcatgggtgcgcagttactatacggaaattatcggcacgctctttccgcaattggagacggggacactgctcccatgctggacagcaggttgcctgctatgcctcgcagtatcttcattgaatattgtaatgatacgtagaaaaatcatgagtatttggaaaggaagataagcggaccggtgacttatattgcaggtgcagctatctctcaggctccacaaagtacgtatcaaagcagactgaaagcaagcaatcccctcttgttttgagatttatccctcgtgtccacccctgaaacaaccgggaataatcagaaaacaaaccgttgaaaaccccgctttccctcatggattttatgcctttgcaaggtgtaaaacttcgttttgcagttgcgggccgaagagcctgcatatgcgggcccgacagcccgcaaccggcaaccgccgggcctgcaactgcaaaacggggttttaccataagcataacgacattttgcagggtccggacaaacaaaaacaacgaagcaaagcgctgtttatcttccggctttccccgaacagcccgtggagaatatccgaatttatacgcaagaattacagtggaattacgggacttatgcaggacaatacgctggacgacctcaatctgccgatggaaaaaggtattttaacaatattggaataaggaacgtacaagacgtttttaaagctgttaatcaatgcattactaaataaaaagcaacggaatgtagcccaaaagcggtgacgaccgatgtttggtcgtcacggttataaggtgtcttataaccgtacaactcccatataatcagctaattgaagtcaaaagtgacgagtgatgacaaatgtaccattatttgccggttgagcttgggttattttacgcttacattgctaatgaattcatttgtcactgcctctttcaaatcgcgcatcttctctccgccgcgttctttacggctacggaaaatatctacttcgttttgaaaaggaatacgcacaacctgcctcgcacactcaataatcaagaactttttagcatcctttctgctttcaaaccgatattaccggggcggcggttcattccgtattttttgggaaagataactgtttcaactgttaaaacagtttgtctattccattttttctgcaaggaacaataaagatggctgccgttacgggaactttgtaatccagcgtaactttgacagcctcatccaaaggttgtcccaataccactcattccgtcttttccagaacagcataaggaaagtatagagcaaaaaaaaggagtaccgctgtactccaacctttgttaaccttaaatctaatactatgaaaaacacattgcaaagatacggacatttgctaaatctgcaaattatccaaaggaaaagatatgttttataacaccttttaagaagaaggacgttttttttacttcctttttcagatatacgctttaaatgtaaagagaaattatatcctcacagaataaaatgaaccggttctttttatctacccgcaaattgcattatctttgtaaacgaattacaaatacttagtatatgcctgactatgatttaatcgccatattaggccctacagcatccggcaaaactccatttgccgccgcgttggcagcagaactcaatgcggaaatcatcagtgccgactcccggcaaatataccggagcatggatctcggtacaggaaaagacctggccgactacattgtaaacggcagacaagtaccttaccaccttattgatatagccgacccgggatataaatacaatgtatttgaataccaacgcgatttcctaaccgcctatgaaagcattaaacaaaaaggctgcctgcccattgtatgcggcggaacgggaatgtatttggaatccgtactcaagggatacaaactactgcctgtacccgagaatccggaattgcgcaaccgcctggccaataaatcactggaagagcttaccgaaatattgcaaacctataagagcctgcacaatacaacggatgtagataccgtgaaacgggccatccgcgccattgaaatcgaagaatattatgctcatactccgatagacgcgcgctcatttccacaactgaacagtctcatcatcggcgtagacatagaccgggaacttcggcgtgagaaaattacccgtcgcctgcgccaacgattggacgaaggaatggtagatgaagtacgccggttgatagattcaggcatttgtcccgacgacctcatttactacggactggaatacaagtatctgacactttacgtcattggcaagctgacctatgatgaaatgttcagccaactggaaatagccatccaccaatttgccaaacgccagatgacctggttccgggggatggaaagacgaggctttactatccattggatggacgcccggtggcccatggaagaaaagatagcttttgtaaagtcaaaactcaaagagatttagtatctttgacggcaacaccgcttaagcggcagatttatgaaaatgttggaccgattgaaagaaacggatatatgagtgtagaacccgataaatggggcgtaatctataaccccaaagccggaacgcgcaaagtgcagaaacggtggaaagagattaaagcatatatggacagcaaaggcgtgtcttacgattatgtgcagtccgaagggttcggctccgtagaacgtctggcaggcatacttgccaacaacggttaccgcaccattgtcgttgtaggaggtgacggtgcactgaacgatgcaatcaacggcataatgctttccaacgcggaagataaagagaacatcgctatcggcattatccccaatggcatcggcaatgactttgccaaatattgggaaatgagttcggaatacaaggaagccgtagattgtatcataaataaccgtcgccgtaaaatagatgtcggcacatgttattactatgacggccaaaaacacatgacccgctatttcctgaatgccatcaatatcggtcttggagcccgcattgtaaaaatcaccgaccaatgcaagcgcttctggggggtaaagttcctttcttattttatggcattcatctccttgatttttgagcggaagttatatcgtatgcaccttaaaataaacggcgagcatatacgcgggcgcattatgacggtgtgcataggcagtgcatggggatacggacaggcacccagtgcagtaccttacaatggctggctggatgtatcggttatctaccgccccgaactgttgcaactcttttcgggaatatggatgttgatggaaggacggattctaaaccataaagtggtaaaaccctaccgtacccaaaagataaaggtattacgtgcacaaaatgcttccgtcgatttggacggacgtatcctcgaccggcattttccattggacatcggtgtgctgcacgaagcgataacattgattatacccaactgagatatgaacttttcatagctcgtaatccataactcataattcaaaaaaacgtatgattgaactgataaataatcctgccggaaacttctttctgctggcaggtccttgtgttattgaaggagaagatatggcaatgcgcattgccgaacgcgtagtagctattaccgacaaactgcagattccttacgtattcaaaggctcgtaccgtaaagccaaccgctcgcgtctggactctttcatgggtataggtgatgaaaaagccctgaaaatcctaaaaaaagtgcacgacacattcggagtacccaccgtaacagacatccatgccgccgaagaagctgccatggcagccgaatatgtagatattctgcaaatccctgctttcctttgcagacaaaccgacctgctggtagccgcagccaagaccggcaagaccgtcaatataaagaaaggacagttcctctctccgcttgccatgcaattcgctgcagacaaggtggtggaagccggcaataagaacgtgatgattaccgaacgcgggacaaccttcggctatcaagacctcgtagtagactatcgcggaataccggaaatgcaaaccttcggcttccccgtcatactggacgtcacccactccctgcaacaacccaaccaaaccagcggcgttacaggcggtatgcctcaactgattgaaaccatagcaaaggcaggcatcgcagtaggcgcagacggtttgttcatcgaaacacacgaaaatcccgccgtagccaaaagtgacggtgccaatatgctgaaactggatttactggaaggacttttaaccagattagtacgtatccgggaagcaatcaaataaaaaaacaagactcttttgtgatttattatttatcacttcgacagataaggcaaaaacattttaaaatcaaataatgatgaaacatttattacgtaacttatggattgccgcattaatcgtatgctgcaacttccaacaggtatctgcgcaacaactgccgcctattcctatcgatcaggatgtacgtatcggtaagctggacaacgggttgacctattacatccgtaaaaacagtcttccggctaaccgcgccgacttctacattgcccaaaaagtaggctccatacaagaagaggacaaccagcgcggtcttgcccacttcctggaacacatgtgtttcaacggaacgactcacttccccggaaagtccctgatacaatacctggaacgtatcggcgtgaagttcggtgaaaacctgaatgcctacacgtccatagacgaaacggtttataacatttccaatgtaccggtcaatactccgggtgctatcgactcttgtctgctgattcttcacgactggagcaacgaccttactctggatcccaaagaaatagacaaggaacgcggcgttatcaatgaagaatggcgtacccgcatgagtgccatgcaacgttttcaggagaaaatgcttcccgccatgtttgccggaacaaaatacgccaactgcttccctatcggaactatggacgttgtaatgaacttcaagcctcagactttacgagactactatgaaaagtggtaccgtcccgacttacaaggtatcatggtggtaggtgacgttgacgtagatgccactgaagccctgattaagaagatgtttgcagatattcccgcccagcccaatggtgccaaacgcgaatactacccggtaaacgataataaagaacctatcatattggttgcacgtgacaaggaacagccttatgtgcaaacctttatcttcaataagcacgaaacaactcccagagaggagaaaagcaacgtgggttatctgatgcaagactatgcagcaacactgattaccaacatgttgaatgcacgtctgaacgaattgctccaggcagctaacccgccttatatctatgctgcaacctatgacgatgacttcttcgtggccaagaccaaggatgcttttaccggaattgtagtctgcaaggaagatgccattgaaaacggtatctcaaccgttctccgcgaaatcgagcgtgcacgccaattcggctttaccgaaaccgagtacagccgtgcccgtgcagaatatctgcgccatctggaatcggctttccaggaacgcgacaagcgtaagaatgaaagctatgtaaaggaatatgtccgtcacttcctcgacaacgaacctatcccgggcattgccaacgaatataccatcatcaaccagatagcaccggctattcccgtaaccgccctgaaccagatgatgcagcaaatggtgacagacagcaaccaggtggtagccctgttcggtcctgagaaagaaggcttaaagctccctacagaggacgctatcaagaaccttctgaaagcggtaaaatcagagaaacttactccgtatgtagataaagtttctaacgagcccttgatgaaagaagccccgaaaggcggtaaaatcgtatctgaaaagaaagacgatatcttcggaactactatgctgacactgtccaacggagttaaggttatcatcaaaaagacagatttcaaagccgatgaaattcgtatgaaaggtgtaagtatgggtggtagctcactcttccccgactcggaaatcatcaatatcaacggattggatgcagtagcattaggcggtcttggcaatttcagcgctattgaactggaaaaagtgctggccggtaaaaaagcttccgtaaactacggaatcggcgataagacagaagccgtaacgggcagttgctcacccaaagactttgagacaatgatgcagctcacctatctgactttcacagctccaagacgtgacgacaatgcttttgcatcttataaaaaccgcagcaaggccgaattgcagaacatggacctgaacccgaattcttcgttcagcgactccatcacgtccactctttacatgaagcaccccagaactctgagaatgaaagccgacatggtagacaagatggattatgacaagattctttccatgtatcaggaccgtttcaaagacgccagcgactttacctttattttagtaggaaacgtcgatgtggaagccgtgaaacctctgattgaatcttatctgggttcattaccctctatcaaccgcaaagaaacattcaaggacaaccacatcgaaatgcgcaaaggaatctataagaacgagtttatccgtcagcaagagactccgaaggtaaataacttcatctcttacagcggtacttgcgcatacacgctccgcaacgatattctcatgagtatgaccgaccagctcctgaacttaatctatacggagaaagtacgtgaagatgaaggtggtacttatggtgtatatcctatgggacagcttgttaaatatcctacggaaagagccgttctgcaaatcttcttcaatacagctcccgacaagcaggacaagctgatgaagattatctatgccgaagcggaagctttcgccaaaaacggtcccgatgaagccagcctgaacaaagtgaaagagtacatgctgaagaaacataacgaaaatctgaaagaaaacggttactggctgaacagcatagacgaatatctctataccggtatcaatccgataaaggattacgagcagattgtcaatggaatcacagcaaaagatatccagaaatttgccaacgaactcctgaagcagaagaaccaaatcaccgtttcaatgatcagccccgaaaagaaatagggggtctgcatcaggagtcgtaaagtagacctttagcgttgcagagttgacctttagaggcgtaaagtagctctttacaaaccgtactatcagcagtctgatttttcaactcacaaccaaagtcacagttttcaaaaggctgcgttgttcgtgaagcagcgcagcctttttcatatacattaaccatctatccattatgaacctctttatagaattacgcaagcacggaaagttggcagccaagcgaaacccgatgtacgagaagaataaattcggaaaattctggatgtacttcatggctgtattctgggccggttatctggtattcttcggaacgagttttgcctttgctttcaacgacggggcaaccgaagcatatcatgtcctgaacagcgggctcatatttatcctctgcctggatttcctgatgcgttttccatttcagaaaacgcctgcccaagaggtaaagccctatctgctgttaccggtaaaacgcaaccgtcttatcgactccctgctgatacgttccggattgaacggcttcaacctgatatggctgttcttcttcgttccgttcgccatcatcagcatcaccagattttacggcataacgggtgtactgacctatagtatcggaatatggttattgatggtgctcaacaattactggttcctgctatgccggacattgatgaacgaacgcgtctggtggataatcctgcctatactggcatacgggagtatcgctgccggaatgttagtaccggacaacagtccgctattcgactggtccgtcgacttaggagaaggctttatcctcggacatcttctcaccttcaccggagtatttgcagctatcgtagtgctgtggttcatcaatcgcagagtgatgataaaattgatttataacgaaatcaataaagtagaagacaccaaggtaaagcatgtatccgaatacaaatttttggaccgctacggagagattggcgaatacatgcggctggaactgaaaatgttattgcgcaataaagtctgcaagacagccctgcgcacagtattcctggtagtgatttcatttacctgcattctgagcttcaccgaagcatacgacggacaaggtatgaaaagctttatcctggtttacaactttgtgattttcggcattctgtttttatcaagcctgatgagttacgaaggcaactacatcgacgggctgatgagccgcaaggagtccatctacacactgctgcgtgccaaatatattctgtacagcatcgccatactcatccccctgttcctgatgataccggctatggcaaccggcaaactggctgtactgagttgcatcggttgggctgtatttgttgcaggctgtgtatatttctgcctgttccaattggccgtatacaataacaggacagtggatttgaacgccaaaatgaccaaccgccagaacatgggaaccggattgcagaatctgatttccggagcggcattcggcgtacctctgcttatgaattttatgctgacaacctttttcggccccacagttacagcctggatattgattgccatcggtgcgggttttatattgacatcccgcttctggctgaagaatgtataccaccgctttatgaagcggcgctataagaacatggaaggatttagagacagcagacagtaagatttacaatttaagatttatggctatgattcagataagtaatttgcaaaagaagttcggcgaaaagaccgccgtaaatatcgacaactacctcatcaatcaaggtgatatgctgggcttggtaggaaacaacggagccggaaagaccacccttttccggctgatattggatttgctgcaagccgaccgcggaaaggtcaccatcaatgatatagacgtatgcaaaagcgaagactggaaaaactttaccggcgctttcatagacgacggtttcctgatagactatcttacgccggaggaatacttctacttcatcggcaagatgtacggacttaaaaaagaagaagtagacggacgcatcgctcctttcgagcgtttcatgaacggtgaagtcatgggacaaaagaaattcatacgcaacttctccgccggaaacaagcaaaagataggcatcatctccgccatgctgcatcatccgcaactactgatacttgacgaacctttcaacttcctcgaccccagttcgcagtccatcattaaacaactgctgaaaaaatataacgaggaacacaaagcaaccgtcatcatttccagccacaacctcaatcatacggtagatgtatgtccgcgcatcgccctgttggaacacggagtcattatccgtgatatacagaacgaaaacaattcagccgaaaaagaattggaagcttatttcaatgtcagtgtcgaagaaaacattgaaactgaaactaatactgaagaagaaacacttacagaggaataaatatgaaacactccttttcctgtataattgccttgaccgggttaatattctgtttaagttcctgccatactgccgctccccgtctcgactataaagcattggcacaagcctctgtacgcctgggtatggatatcggactgacagacaaccacaagctgtacgtcaatgccgccgagtggataggcactccctaccgtgccggcggcgacagtaaacatggaacggactgttccggcctggtatcccaactttataagaaaacctaccgcatacgcctgtcgcgcagcacggacggccagttgaaagaaagcaacaggatagcccgccgcaacctgcgcgaaggcgacttggtattctttaccagccgggcgtcacgcaagaaagtggcacatgtaggcatctacctgaaagacggcaaattcgttcatgccagtaccggacaaggagtcatcgtgagcagcctcaaggaagattactatacaaagcactggctctgcggcggaagagtgaaataagactccatccaacattaaaaaaagggtatgcctaaaagaaagttcacttattatttgtgtcctttaggcacggattacacggatttcacagaagaagaataaagtaaatctgtgaaatccggttacgtatcatccgattcgtcaacgtaacacaaaccgtaactttccaccctctaccagctcctggtggctgattcggaaacgtgacagtctttttcctcctaactccatttcacggatataaagcgaatcgtccgaaggacgctccgtttctatcaccaactgctcacgtccccacacttcggcatcaagacggatggtcactttgtcgaacaccggtgtggaaagcgtgtaagacggttcgcccggacaatccggatagaagcccatcatattgaagatggcccatgcagacatcgttccggtatcatcattgccgggaatgccatcgggggcattcttgaaatacttctgcaaaagacggtgtaactccttctgggtacgccactcctctcccttgaaataagagaacagatgcgcataagcgatgtccggctcattggcagggtcgtaaagcccctcatcgaaaacacgttgcaacttgtctacgaaagccttcttcccgcccataagttgcgccagcccctttacatcgtggggaacatagaaagtatagttccatgcacacccctcatgaaagcccggattaggttcaaagttttcgccctgcctcgggtcaaacggagcataaaactcaccgttcggcaagataggacggaatgtgccgtactccttgctgtaataatgcttataccccaaagaacggttatagaaaagacgggcatcctccttgtagcggcgtgctttttccttctgtcctttcacctcggcatccttggcaagcgcctctgccatgcgcgaaagggcgttatcggctatgtagtactccaaagcatgcgatacggagttgtcgtactgctcgcgcaaaggtacataccccaatgaaagataatcgtcattatccggtcgcaggagattttccgctcccggcaatacagcccctttacgcatcgcctcataagccagctccacatcgaagccgcgcaaacctttcagccaggtatccacaatgaccggtatagaagggtcgccctccatcgtcaatgtctcgcgtccatagagttcccacttgggcaaccagccatgctcacggtacatgtcgagcatggaacgcaccatttgcagttgccgttcgggatacaccagcgtaagaagctgatgcacattacggtaagtatcccaaagggagaatacggtataccggtcgccctttgccgtaagaatccggttgctttccattgccggatattgcccgttgacgtcctgcaaaaggttgggatgtatcagcgcatgataaagcgccgtatagaaaacaatcttctgctcgtccgtcccgccttccacaatgatacgcgacaaatcgtcgtgccagcgtttacggctttccgccaataccttgtcgaagtccttgccggactgctctttgtccagattgagacgggcattctcgatactgacgaaagaaacacccatctgcacttctatctgctcgctctccccggtatcgaatgtcagaaaagcgccgatatcatcgcccgccagttccttgcgataaccggtatacaatttatacttgccattgtccggatcccattcggcctccacgcctgtcatggagcgctgttttttccaataaccggttttgaggggagttttgttgacacgcatcacgaagtaaataggaaatactgcctgcggattatagcagaaagtaccgagcaacttcatcccctcaaattcacactctccggtttgccgcaggaaagctccggtttcattggtcagtccctctcccaagttcagcagaatatgactccggccttttggaaaagtgaagcgcgccacaccggtgcgcggcgtggcagtcacttcggtctttacattataacgggtaaggaaattagtgtaataccccggagaggcctgttcgtcttcataacggctgccatactccttgtagtctacggaaagctcgcccgtagtgggcatcagcagcaacgaaccaagttcgggacatcccactccactgagattgacatgcgaatacccggtaaagaagcagttgtgatactcatagggagtggaccaccaacgggcatccttatcgtatttgttgtccgccgaccccatcacgttgaaaggaacaacagacatcatcccgttggggcagacagctcccggattggtcgtgccgaagttagtcgtaccgataaagggattcacatagtctacaggagaaaaacttttctccgcagccggagacacagccagcagaacaaaggcaaatacgccggaaaggaatgctcgtttcatggttctcaaaagtttatgtacatcagatgatgcttgtacgtttggtaaattctataatttcgggaatatagccgaatgccagtccggttacggtatcggcacagccatagtatatggcaatcctgcccgtttcattgtcgtgcaaagcggcgcacgggaaacatacattaggaacatcgcccatacattcgtacggttcgcgcggggcaagcagataaggccctgagcggaactttaccttccacggttcgtccaaatcgagcagagcagaaccgaaactgtaaacataaccgttgcaggaatgcagcacgccgtgataaatcagcagccagccctcgggagtctcgacagggataggacctgcaccgattttggtgcattgccatgcacttacctcaaaagcggcaggtgacatcacatggcggtggcgtccccaaaactccatatcgggcgactcactgtagaaaatatctccaaagggagtatgcccattgtcgctcggacggctcaacatggcaaaacgaccgtttatcttgcgcgggaaaagtactccgttacggttgaagggaataaaagcgttttccaactggtggaacgtctcgaaatcgaacgtataggccacaccgatagtaggaccgtgatagccgttgcaccaggtaacataatagcggtcttcgataaagcacacgcgcgggtcgtagccatacacccatgtaccgatttcctcatcatcgcattggaacttcaacggttcttccttgatgttccagtttatggcatctttactgaaccctacgtgcagccgcatgcgacggttagtatcgtcgcagcggaatactcctgcaaacccgtcgccgaaaggtactaccgcactgttgaaaatactgttggaagtgggaagcaaatcacgcggaataatggggtttgccacactgcgccataatacgtccttgcatcctgccggacgttcttcccaaggaataataactttgctactcatactcatttcattttctatgtaataacacgaaattaaatctatctatcactactgtcccgtaaaagtggataaatagttctttgaaattattgaaatatagtcaattacacggttttttgaaatgaaacggacttgattttgcaactttgcagtctaatacaaatggctgctatgttccaagacaaatacgtattctctcaattaaccgcttttctgaacaggactcagttcaacaactatgttcgcaagtatgatggcaacagatatgtgaaacatttcacttgctggaatcagatgctcgcgatgatgtttggacaactgagtaaccgtgagagcctgcgagacttagtcgttgctttcgaggcgcatagggccaagcaatatcatcttggtttaggtcgtgaaccgatagccaagacaactcttgcgacagcgaaccagaaccgtgattacagaatcttcgaagactttgcattctatatgatgaaggaagcctgcgagaagcggacgaccaacatccttgacatttccggaaagaaatatgcgtttgattcaacaacgattccgttgtgtcttgcaacattcccatgggcaaagttccgaagcaagaaaggaggggtgaaagctcatgtcttatacgacattgaagcacaagttcctgccttctatactgtaactactgcatcaaagcatgattccacagcaatgtcttcaatccattatgaaccaaatgcttattatatattcgacagggcttatgactcctttaaagaactctataggatacatcttacagactctttctttgttgtcagagccaagacgaacttaaagtataagacagtcagatggaagcgaagaatgccaaagaacataatgacagatgcggaagtgaaactgaccggatatctctccgagaaaaaatatcctgagtcattcagactcgtccgatattacgacgaagaggatgaccgtgagttcacttttttgacgaatgcaaaacaactttctgcactggatgtcgccgatctttataagaaaagatggttaatcgagctgttcttcaaatggctcaagcagcatctcaagataaagaaattctggggcacaacagagaacgctgttcgcatacaaatcagtgtggctattatcacgtactgtcttgtggctattgtccaacatgatatgaagttgaaacgttcaacctatgaagttttacaaattctcagcatatcattgactgacaaaacccacttgcgtgacctgttcgacaagactaatttcaatgatgtcaaagatctaaatgatcccctgattccggggctttttgattaattgtttaactcgtcccattttaacgggacactaatgtctatctataattacttatataatctgtcatagaaaccgggaatgtacgggaagccggcatcaatcgaaaccactatccggaacacgtcccgccaatgtttttccaccgactatgtggccgctccgccttttacctcatcggcatacgtaaacggtacgaaccaggtaatgaggaatgccggaatagtggcgaacagggtgaagatgaagaaattctcataccccagaaaatcgctcacgtatccgctgattgttcccggaagcatcacacccagattcatgataccagaagcgaaggcatagtgcgccatctggtgcttgcccggagctacctgttgcatcataaacagcgaaagccccacaaagccgaagccgtaaccgaaatactccagcacgatggcactgccaatcagcatgccgctctccggctgatatatcgccagcagggtatatgccacaaaaggcaggttaaagatgcagcacagggagaacagcgttttccgcagtccgcggtgcgatatgtaataaccggccagcaaagagcccagcacaaaggcggcagctccgtaagtgccgtaatacaaccctatctcctgctcattcagtcccaagccgcctgccgaacgttccgccttcaagaaaaggggaacaatcttcatgacgaaaccctcggcaaggcgatagagaatgataaaggcaatataataccctatatgacgtttctgaaaaaaatcccagattacgctccgcaacttctccagcgtttcgcccgccgacttggtttcggcagccgcagcaccgcccgaaggcagcatacgccaatggtatattgccagcaatatcatcacggcagccattaccagcattacacacatccaagcctggacagttgcctcatgacgcactgcatccgtagcaccgggcactccgccgaagtatttcagcagccacccagccagccataccaaaccgccggacgccacaatcttggcgatgttatagaaagctccctgccagccgatgtactttgcctgttcctgcttattcagctcggacatgtacacgccgtccgttgccacatcgtgcgtagcgccgctgaaagcgataaccgccaacaaaaaaatggaaagagcaaaaaagaacggaagattcagtgcaaaggcgaccagtgcgaaccccgctcccgtaaccaactgcgtcagtaccacgaagaatttcttcgtcttgaacatctcgagaaaaggactccaaagaaacttcaacgtccagggaagcattatcagtgaggtccacaaagctatttgggcatcacccactcccagccccttgaacataagtacggaaaccatgttcagcaccacaaagggaagccccatggcgaaataaacggttggaatccaagatatcggattatgataattccggctcatatatgtttcgttgctatcggtactttctatttccgtaactcattatccggcatcagcggttccgctcccatagtcagctccagcgtaccgccgtttacgatgtcttgatggttgaagaaaggagcggcaagttcttccccgttcaggataatcttccggacatacttattgtcacgactgttattatgggttataatggtaaaggtgttgccattctgcaaacggatggcggcctcatcaaacagcggacgcccgatggaatacaccggttttccggggcaaacctggtagaatcccatagcattcagcacgtaccatgccgacatctgtccgcagtcttcattgccggaaaggccattgggctcgttgaagtaaagcgtatgcagcacactgtccaccaatgcctgtgtcttgtacggctgtcccacatagttataaaggtgagcaatatggtggctcggctcgttaccgtgtgcatactgtcctatcagtccggaaatatctaccgataccgactcgccctccaaggaagaatctgccacgaacagagaatcgagcttaccgatgaatgcgtcacggccacccatgagttccaccagaccatctacatcatgcggcacgaaccaagtccattgccaggcagtgccttcacaataatcatcgttgcggtgagtggaagcacgaggattgaaaggcgtacgccaattgccctcgctgtcgagcccgcgcataaaacgggtagacggatcgaaatataccttataaccctctgcaaaagccgcgtacttagtccggttcggttcatcgcccattgcttcagccaactgtgagatgcaccagtcgtcataagcatattccaacgccttggctaccgattcattgtctttgtcacagggaacatagcctattttattcttccagtatttggcctgcggcatcaaatgcggcaatacacgggggtgagtaataatgcccgtcgtatcgtattccgccgtacggagacaggcacggtaggcttccttcacatcaaaattacgatatcctttggcgtaagagtcggcaatcagagaagctgcatggtagccaatcatcgttcccgtatagttgccggcaagctcccacatcgggaatacaccgccttctttctctttctggatcaaagagcggataaaggcttcattcagttccggatctataattgtcatcaaaggatgataagcacggaaagtatcccacaaggagaatatcgtgtacacaggttcgtccacactgccctgatgcggcttcaaatccataccgaaataacgtccgtctgcatccgtaaaaagattgggctgcaaaccggtgtgataaagggctgtataaaacatcgtgcgctggtcggcattctgcgtacggatatctattttggacagatagtcattccatgcctgacgtgctgcactccgtactccgtcaaaatcccatccgggtatttcggcctccacattcttacgtgctccgtccatatcgacagccgaaacacccactttcaccaatacctcttcattctgtgccgtagggaactgcaacagaactttagcggtgggcaaaagcggaccgccttcttccaatgccacagaatccgtcaccaatgtataggtaaacggcttggagaacttggcatagaagttgatatactggtcgaatgcccaatataccgtttttttatgtccgcggatttcggtatcactgattacttctattttcatttcctcatttgtctgacgctcgatactgtaatcaaagtccagaatgaaaccggcatcttcggcttccggaaaggtataacggtgaatggcggcacgctttgtcgcagtgagttccgcctttacgttatagcgttccagcaagacggaataatatccgggttgcgccacttcattatcgtgcgagaaaaccgaacagtacgccatttgctgactcttcgcccccatcggatgatactcctgtttcccaacagtaggcatcagcagtacatcaccgtagtccgcacatcctgttccgctgacatgggtatgcgagaaaccgttgatggtagtatcctcgtaatagtatccggaacaagcgtcccattcatagatacgtgtatcgggactgggttgaatcatcccattaggaacaaccgcacccggatatgtatgtccatgtccgcctgtcccgataaagggatttacataagaggcatagtcctgctctgcctgcgtacagctaaagacagtacccagcaacaggagtccgcccagcaatatggaattagatttcaagtttgttttcatattctttggtattacattaggattatcaaatcggcataaagctgacagcctgtcccccaccttttgccatgacaatggtcagggtatcatcggatgtcacctgtttctctatgatttcgtaagattccggattggtctcccaatcggcatcttttccgtcggcatagataacggctgcataagtttttcctttttccagaaaatccagtttcacatctatgctgcgcgcctcttcatcggttgccgcccccagaaaatatttatcttttgccttacgtactattgccacgtattcacccggttcgccggcaagcgcctccgaccagtcacagtctgcatcaaaatcacggaagaaacggaaagcgggatggccttcatagttttcaatcatgtcggcagccatctgcaaaggagagtaaagtatcacccaattggctatctgcttggcaagcgtggtattgatacggcaatccttactgtctttcatattccactttttccggtcgggattgtttttggcacgcttgtacagcacatcaaagatacccggcgtatagtccatcggaccacccagcaaacgggtaaacggcaacatcacatgatgttccggcggattaccttcgctccaggcattccactccatgccgcgggcgccttcgcgggtcatcatgttgggataggtacgacgtataccggtatcctttatcggctcatgcacatcgagggtagtacgatacttggcagccgttttcacgacattgcgataatgccgcacattgaactgtccgtggtggttgtgaccgttgggaagaccaccggcatacccggtctttacgctatggatgcccaaatcggcataccattcataagccttatccaactgattttcgtaattacagatatttcctcccgtttcatgatgaccgataatctcaacacccttcttccgggcataggctgctatttcctttatatcgaaatcggcatacggtttggtataatcgaagttctgcgttccgccccagttctcccaaccttcattccagccttcgaacataacggcttcgatgttgttggctgcggcaaaatcaatataacgttttgcattttcggtagtggcgccgtggcggtcgtttatcacccagctctccacacccagatgcatgccccaccatatacctacatacttcatcgggcgaatccagtcggtagactccaaaacgcagggttcgttcaagttcaggataagtgctgaatttatcagtcccacagctttcgaagctatctgtacagtacgccagggcgtattgaaactgccgccttctatcttagccttaatgccgtcgggccatggagccaactcggatttgaatccgcagccgccggtattttgcaaagtcatttcaggaaagtccgtcaatgcggcttcgtgaatactggcgtaagtcttacctaccttaaaggtcatcggagtgtttgcgttatcagtcttgctgagcggctgtgtacgatataacaactcatatgtttcgtagttggcaggaatagaccaggaaattccatcctgcgccatattgaaagaggtaagttcgtccgtaacaaagatgctgtctactccggcaacttcatactcgtaccggaaaccgactccgtcgtcaaatacccgaaaacgaagggtcagtttcgtatccgcctcatcagacagacaaaccgccatttcattataatggttacggatactcttattctcgccccaaggttgtgtccatgtctcgtccgcagcggaaaactccgtaccgacaactttcataccttccgaaagattcacaccctttccggcaaggaatcccaaagcagaaggggttacaaaagccgtatcatccacatctatccgataggtcatgcggttgtggtcatccaatgcaaactgaaggcggatatgaccatcaggcgaaacgacttctgtcggtttgggagtacatccgcatattacaagcagcagactgacagtccataatattgttttcatgtttttccggtaatcttttattgtgtaatggtacaaaaacatgcagctacctacgcttttccttagaaaacgaatacggataatcttccgcacggacacctcgctgcaggttgggcttatcgcccatttcgaatttcagcgtaccgcctttcagcaagtctccgtggcgcagatagtttttggtatattcatttccgtcgacctgaagagactgtatatagacattctgcgcactgttgtttccggcatcgatcgtcagcgagtttccgttttcaaaatgcagaacggctttcttgaacaagggagcacccaatacatattcgtccgtacccggacaaaccggatagaagcctaatgcggagaatacataccatgccgaagtctgcccgttgtcttcatccccgcaataaccgtccggaccgggtgtgtacatgcggttcatcacctgacgcagccaatattgcgctttccagggttgtccgatgtagttatagagataaatcatgtgctgtataggctggttgccatgtgcgtaattgcccatattcattacagtcatttcgcgtatttcatggatgacttgtccgtagtagctatcatcgaatacaggcggaacaatgaatacggaatcgagcatattggcaaataccttttcgccccccatcaaatcgaccaatccttgcggatcgtggaataccgaccaggagtagtgccaactgtttccttcggtaaaggcatccccccacttcaacggtgagaacggtgtctggaacttaccgtctttattacgcccgcgcatcaacagactttccttatcgaatatattacggtagttcatggcacgctttgcaaacaactcctgctcctttttcggacggttcaaagctttggcaagcttatagatgcaccagtcgtcataagcatattccagcgtacgggcggcattctcgttaatcttcacatcataaggaacatatcccaacttattgtaatattcatagcccaaacgtccggtagatgatatttccggatgtacatgctccgttccgtaaagcaacccttcatacatagtctttacatcttctaccttaacacccttcaaataggcatcgaccaaaacggaagccgaattattgccgatcatgcagccacggtgtcccggactcgcccattcgggaaagaaaccactttccttgtaagtattgaccagtccttcctgaatttccctgtttaccgacggatacatcagattaaggaaaggaaacagacaacggaatgtatcccaaaaacccgtatcggtgtacatatagccgggaagcacttccccattataggggctgtagtgaatgggagcaccctgcttgtccaactcgtaaaaagcacgggggaaaagcagcgagcggtacaggcaggaatagaaagtgcggtattggtcgaggtttccgccctccacttcaatcttgcccaacacattgttccaagcatcacgtcctttctgcaccagcgtgtcaaaattgtccgtacccaattcgagcaagttccgctcagcctgttcgtagctgacaaaagaagaagcaacacgtgcatgcacaatctcgcctttcttcgtcttaaatccgataatcgcacctgcatggtcagcttgctgctctttctgcgattcctgaattacactgtctttaacagaagcggtatatgtaaaaggtttgtcgaactctacaataaagtagtttctgaaattctgcggtacaccgccgctgttacgggtggaatatccgatgatccggttcttttccggtacaatcctgatataggaaccgcggtcgaaagcatctaccaccacataggaatgttcattttccggaaatgtgaaacggaacagcacggcacgttcggtaggagtaaactccgtcaccacatcgtgctccgccagatataccttataataatgcggcaacgcaatctcacctttatgcgagaaccagcttgcacgtttgtcctcatcgaaaacaggttgcccggtaacaggcataatggagaattgcccgtaatcgtttatccatggactgggctggtgcgtctgcttgaagcctcggattttattggccgtatagacatattgccagccatcccccatttttccggtttgcggtgtccaaaaattcattccccacggacgcgcaatggcgggataggtgtttccggtagaaagctcgaatgtggattgagtacccaccaaaggatttacatactgtacccaatccttagcctttatgctcgtaaaacagcataaaaaggcaaatgccaataaaagttttttcataatatttgaatttcagattatcaataaacaaaacaagcctgttctatttggatttggaagaagatataaaaacgttttcgcctattaccttgtatttgataccgatggaattctttatcaaatccaatgtggcagctacgttttctttcttcttcaacggtccggaatatgttctttcaatgtccacatccggtgctataatgattttcacattataggctctctccaaaatcttgcaaagcgtgcgtatgtccgtctgatttaaatcgaatgccgtatcatgccagccctctatacccggttctgcaggtttcaccgtcagtcgtcgggtcattccgtccaattcggcctgttgccccggcgaaagcactatcatgccttcaccatgattgccctttacttctacctcacctttcaataaggtggctaccgccctttgtccgttttccccggacttcaaattaaaggttgttcccaataccctcacttgcatggcatggctttgtacgataaaaggcttggctgtatttctcttcacatcaaagaaaccttctccgttcagatacacatgtctctcgccaccttcaaaattacggggatattgcaaaatcgtgtttttattcaaccatactttggttccatccggaagcatcagctcctttatggtttcattggccgtaacagtgaccaaagattcggaactacggctacccgcctgatagaaccagtagcccatacctcctataaaaaaagcaccgactgcaatagctgcatattgcatccaccggtgaaacagtttacgcttcaacttacgcttccgctcctctccgagcctctgcgacaattgtttttcagccttcgcaagaagtgcttcctcagaaaccacatcggattttcccaaatggtacagttcctctaatgtaaataattcatgagcattctcttccgactcctccaaccagacattcaacgagcgaagttcctcttccgaacattcacccgctaaaaactttactattattttttcatccaatttgcccattttcctgttcatgttacaatattagaacaatcctatctttaaaaacacttactaatccgaccgataattaaagagaaaatgcctatttgcacatcggagtggcaacctttcggttaccacccggtacgttcatactgctttccgctccactctacttcatcgtcgtacaacaatcgggatatacggctgaattctttttcatacgaacgttcgttgttcaaatcgtaaacagcaaaatagccccaaccgttctgacggatgtttttcaagcagtcatcatctatctttacatctcctctggctgtggtgacttcaatagcatacgggcattgtttggctatgcttaccgtatcggcaggaatggccttccacttaccgtaatatccgtaaatggaataatcgatcaattcatccactgtttttccttctaccgtaccgaccggatagtcgtatcctgcataccagtaaatccctattgtcttgtccggcattaacttacggctttcatacaccaaatcggcataacgctgcgaagtacattcttcaatacttggcgctactgcatccgaaggaatatagggctccacagcctggtcggtggcataggtggaatactcatcatcaaagtctatgccgtcaaatccataaatatcgatatacgctttcaaatcctttgcaaaggcgcgggcggcatctttcgaaagactacgcataccggcagcagtgtggtctcccaagatggagagatgaactcttatgccttttgcctgtaacgggcgtacagtctgctcgatattatcaagtacaaatctggtttgctcgttacacgaaacataaggaacatcatccgcgctcaaacggatattggctgcaaatacactggctatgtcaaagaaaggagacttatcgctcttcatcgtgtactcacccgcattcaacatactttcacgattgacttccacataacataaattctttaccttgcgtcccgcattgacttccggcatggctgcaagcggttttaccaaataaataaaagccttgttgtccgtatgtttttccgttcccgcagtagctaccgccgatacagccacagcataggtagccccttccgttccacccggcagtatatccagtgcaagtgtggcagacttacttttaccggcttcaacaaccacgttgccattgttttccagcaacagtttgtctgccggatacatcgtataccccgtaccattcaactggttataagcatccaatatcctggaatccagtttgaaagtaacggcaacctcctgttctgccggttcactcaattcaaaaaacaaatgtcccgtagcttttttatctcctctgagcgcaatgggagtcaacatttttgcaccggcggcagacttcacttccccgaaaatcgctccgggattttccgtagtctgttttctgccattacccacttcggagcaaccggaattcaatatcattgatgacagcattaaaacacctgccgatataagcgttcctattttcatatatctcatatattattattcatttagattaaaaacaaaaactaacctaagagagatatccgcaatcatacttaggttagttttccatataggaaaacggcaatgcaccgttttcctatcataacttaaaacggattatctgaagttatccggtgttttccatttaccggtttcatccatcgtatctgccacatcccaccatactttagtaccttgcgtataagcaggcttgttcggatttctggattcactgttcggatagcttacacgcttaatcagtttggtattctctacctcaccgcttgagttgttgccataacgcggcagcaacaaataacggggataatctgtgcggcgaacctcagcccaaccttcgttaccgttaggatagacagccagccatttttgtgtaatgatttgttccagttgttcttctcttgaaccacctgcttcgaaagcctctttacctttcaaatggtcgatatattcctctgctttatctgaagcaataccataatagttcatagaagcacgtacaccatcttcatacaatcttccggcaaccgcagttcctgtttcattgccccaaccacgcaatgcagcctcagctctcaggaaaagagattcagagtaaccgagccaaataatttcacgagcctgattccaccaacaatcgggaagcatttcatcgctcttcagattagtcttcataggtgaatacttcactgtatacttagaaccgacttcttttgctccatttctgtatccgccgtattcagcattggggtcctctgctttataatcgtccttgattcccggatcatagggtgaaggacggaagaacagtatcttgcaacggggatccaaatagcaattcgcttctttttcattatacttggtagcgtccaatccaaagatagtaccttcctcatctgcatttcgggcaaccttttcaacaaagccactgacattggcatctacaccctctttaagagcctgatttttataagcccactccatctctttcggtaaaacgcaacttgcaccccagctgaacatcaatgcaaagatattctcattgccaccggttatccactgacgtttaggaatcagtttcatattatcttcctggcctttcatcaagcccgaaggatctgacaaagctttttctccttgctcccgagcaacttccggagcaacattgcttacacgtaaagccagacgtaagcgcaaggtattggcgaaacgaatccacggctctaccttacctccatagatgcggtcgtcctcagcactgaaagagtattgatctacagcaggcggattatgcaatcccgtaatggcttggtcgagcaatttaaagataatgtcatacacttctttctgcggagtataagtaacattttccgtaggcggcatcgcacctttcacataatactggataggaatatcaccatacgtatcggtttgtgccgaaagcaggaaagcgtaatagatacgggttatatagaacgcattgtgataatactccttgttgcagaaccagaaagtcttgataagctggctgtactcggcaatcgtacggtcgtcataaaaatgcttccaacgggcagcagaccaaccgtcattataagcatacgccggtgaattgttcaagaaaccgttcgagccattatatgccgcatagacatcatgcgtcagattggtagcagtctggtaatcgttatacagaccttcataagtaaagttgaagaaaatagagcctagcgcactttctgttgccttcaaactttccaaagcgctctccgaaatggtataatcgatatcaataccctccggaccgcaatccataaccgacgggtcatagacaggtgcgttcggattggtattcatttcttcaaaatcatggcatccggccaatgccagcaatgagcagagagcaacggatttatataaattaagtttcatataattttaatatttgagtttttaagtttcctactgcattatcaagtttaaaaacctaagctgacagacagaccgaatgtacgggtataaggcagtgccgcatagtcgatggcctgtgagaacatggttgtatcataaccaccctccggacttgtacccggtgtatgtttcagcaggtaacaaaggttacgtgccacgaatgatacgctgagcgactgaatcggagtctttttcaacagtttagtcgggaaattgtaaccgattgacaactctttcaatttgatgaatgaagcatcgtacaagaaatcttccgccaacaacgcaccgtaatactggcttgccgtaatcttggtagtattgggttgtccgctttcggttacgccggggaacaccatcatataattatccttctcaccgcgattctcggtacgctttgccaaaccgttaccggctgccaccatctcggaataagaaaggatgtcgccaccgaatttcatatcgaacattgccgacaaggtaattcccttataagtaaaggtaggagatacggacatagtcaaatcaggctgaatattgccgataggattgtttacgcgttccttctcatcgttgattgtctgaggcaaaccgttctcaccgataatgatattaccgctgtcatcgcgtttgtacagtttctgagcatagatttcacccagtttttctccggcacgtgcacctacgttaacggggaagttgttgtcaccgttaaagaacaggtagttcacattagcatccggtgccaattctttcaccttagatacgttatgagcaatattcacattcaaatcgaacgtaaagtctttggtatccacaattgtagaataaagcatcaactccacaccctgattggtaatcaaaccggcatttacccattgtccgccactccagggagccgctgcgggcactttcataatctggttcttagtcttgctataatagtaagtgaagtcaaaacccaaacggttattaaagaatttcatatcaagaccagcctcgtaagaggtagcgatttccggtttcagattgtcattcatcttcacattgctcttatccggaaccagaataccgttgtcgaacttataaccataggtatttatcaactgatagggttccgtatccttacccacctgagcagcagaaagacgcaacttggcaaaggtaacccacgacggcaacggtttgtcgatgctcttcataaagtcggagataacaaaactcaagttggcgctgggatagaagaacgagttgtgtgcctttggcaaagtagatgaccagtcgttacgggccgtaatatcgagtgacagatattccttccatgacatctgtaccgaaccgaatacggaattcatggcacgttcacgttccacattagcagcggtacgaagcagattggaagcattgaacatccacaatcctttagtgtgcatattacccacaccggcagtaaggttctcgaatttctgatacatgaagttagcgccggcagtaaagcccagacggaagttatcagtcaactggcgatcgcccatcaatacaaattcggcattgctttcaaagaagttctcttcaccgcgatccatcttgtcatccttaatctggctggggaaagattctccgctgataccgtcaccgccattggtattctccacacgggtacgatagtagtcgaacgcatatttggctgaaagatgcaaccaatcggtaaagttgattttagctccataataaccgaaggcacgccagcgctcgtcgctgttgtgacgttggttcagtacataataaggattacggatgccggctgtaggaccataccagttgctgtgtacacggttctccgtagaatattgtttcaaatcgtccagacggacattatgaggaatacccatcaactgattgattgcaccgtagttaccatactccggacggtctgttgccttcgtgcggctcaaagagattttaccgtccatagacatccacttattcagttccgtaccggcattaaggtcgatattcacacgattcagtttttcattggggaatacgcccttgctgtccgaaataccgacagaagcacgataatgagaagtttccgtaccgttgctcacagatacgttatgattttgagagaaaccggtatcgaaataatcctccagtttattgccatacttggagtaagcgtatgtctcaccgttccaagccttttgctggctgccgtcaagaacaggtccccaactgcccgatgccgatgtagtatattcagcaccgccattcgcaccgatttgtccttgtccgtaacgggtttgctgttccagcgtttccgctacactgctccaggtgaaattaccgttataacgcacaccgaaaccggttttcttggaacctttcttggttgtaacaaggataacaccgttaccggcacgcgatccgtaaagagctgccgcattaggtcctttcaacacggaaatactttcaatgtcatccggattaatgtcgagtgctgcgccaccacggtctacaccaccatagaaggaagcatcgctgttattgttatcgctgaacggtacaccgtctacaatccacaacggctggttgttgtcgctcaaggaagagttaccgcggatggtgattttggtagaaccgcccaagccggtagccgaggtgttcatttgaagacctgccaccttaccttgcagtgcgctggttaccgacgggtcgccggttttattcagttcatcgctcttcagttcctgaaccgcataacccagcatcttcttctcgcgcttgataccgagggcagtaaccacaacctcctgcaataactgcgagtcgtctttcatcgttacattaatggcggcttgtccgtttacatcaatgtctaccgcttcatagccaatgtaagagaaacgtaatttggccgacggagtcgaaacattcagcgtataattaccgtcaatatccgtaatcgcaccgttggaagtccccacttcctgaatacttacgccaatcaacggttcgcccgtagtatccgtaacggttcccgttaccttgtgagttgcctgctgggctacctgggcaactgccgtccgcgtttcttttttagaaagatacaccacgccgtcttcaatgcgatagctgacaccctttccctcgagcgccttgtccaaaacggtttccaacgaagcattcttcaaattcactgcatgtacaggaatggaagccagattgtcatcataaaaaaattggtacttggactgcgccttgatctgctttatcatagtccctaaacgggcatttgacaaagcaacattcagttgagctgccgcaatctgagaagaggttgcaaacatggcaaaaataagaaatgcacgaagcagtttctgaaaattgcacaaatacttgtttttcatacttgtctcttttaagattaaactaattactttatattagattttttcactacgataatataacaaccacacctatggaaaacacttacgcgagcaaacacttttttttcaacaaaaaatatttatcttacaatcaaaaccttacagctatttgttccggatataaccttccagccggctacgcaaaaatttcaatgccttatacatatgagcctctaccgtacggagcgatacatccatggcttcggcaatatccttattcttcatattgtgcaaatagctgagcttaaataccagcttgcatttttccggcaattcgtcgatggcgctgatgatatgcttccttaattcccggtcttctatccgtttcagcacatcgttatcatccggctggtaaaacagggcgcgtttattgtacacttcctgcatggctgcttcatagctgttcttgatgtcgcgatgtttcaacacattcagtgcacgggtataaaccgcccggtacagaaaagcttgtatctgctcgcccactgtcacactgtcttttctgtgccagagctccacaaacacttcctgcaccacatcctcggcatcttcctcccctaccatgcgcgctgcataaaacagcagattcgcatagtatttccggaaaagttgcctgtacactatgtcaaactcatcttccatatattatttcaaggtaagctcaataccatgcttttccgggttcacttcccatttcgaactccagaatactgccgttcattatctgctcatgcataatataacttttgtcataaggctttccgtcgagcttcaccgaccggatatacctattcttcccgctcaccccatgagcaagaaccgtaaaggttttgccattggacaaccgcatccttacctccggatacagcggcgtacctatttcatactcaccgccaaccggatttacaggatagaatcccatggcgctgaatacataccaggcagacatctgcccgcaatcctcattaccgcacaagccggcgggcgtattcttatacagctcacgcatcacctccgacgcatacttctgggttttccagggttgccccactttgttgaacagataaataacatgatggctcggttcattgccatgcgcatactgccctatcataccggtactgaaaattggaagctcctcatcatcggcagggcggtacgtgaacatactgtcaagcttctgcgcaaagcgctccttcccgccggtcagggctatcagcccatcaatatcctgctgcaccgaccagaaatactgccaaccgttgctttcgcaaatatgcggcgtataatcatccggcgagaaaccgtctataaaagctcccttgtcatcacgcggctgcatgaaagatgtctgcggattatatacattcttataattctgcgaacgtttgtagaattcatccgctacctgccgctcacccagcttctcggccaagcgggctatacagtaatcatcgtaagcatactccagggttttggagagcgaccagttctctgcattatagctatccgtcacgttgtaaggcacatatccatgcttcttataaaggccgataccccgataatcatccatattggctgtagccacgcaagcctccaaagccttcttagcatcaaaatcccctatacctttcagacaggcatccacaatgaccggtacggagtgatagcctatcatcatatccgtttcactgccataaaaattccataccggcaggcgaccgttctgctcataaaaggcaaggaaggatttcaccatgtcgttcacacgcgccggttctatataagtataaagcggatgagaggcacggtacgtatcccataaggagaaagtgctgtaattcgtccatccgtcggctttatgtacctgcctgtcgggcccgtaataagaaccgtccacatcggcatagatggtaggagccagcatcgagtggtaaagggccgtgtaaaacttcaccttttcatcgcgattgccgcactcgatttctatccgtgacaaatgcccgttccagtttttgcgtgcggcagcaaggtatttatcgaaatcatcatcaggtacttccgccgccagattacgtgctgccccttccatgcttacccccgaaatggccgtgctcacaaggagctgttctccctttgttgtcttaaagtcaaaacgtgccatgaccgaagtcccgattctttttccatctttcaggactgctgccgaatccagccgcatcgtctcaaaggggcgggaaaagcgtgtacggaaaaagatgcgctgaccgcgcgcccatccgtcagaaaaacgatagccctgaatagtaacggaatccactttctctacataggaatcttccgtaaagtcccagttcatggctttcctcaaattcaggataacggctgcatcagcctggggaaaggtatagcgctgaatgccgcaacgctcggttgcggtaagctctacgttgatatcgtaatctttcaggagcacgcgatagtaacctgcgcttgcggactcatcggcatgcgagaaccgggaatggatgcccaacggttcttcagcctccttataaggaagagttaccggcatgaaggaaatgtcatacaaatcgcccgcccctgtacccgaaagatgggtgtgactgaaaccggcaatcgtactgtcgggataaaaatatcccgaaatgcggtcccaaccgggaagcccgttgtcgggactgagttgcaccatgccgaagggaacctgtgcaccgggatatgtattcccggtaaaatctgtaccgataaacggatttacatagtctgcataacattcgtctgcgactttcaaagcgtcccgctgcatacaagaggatagcaacaggacaggcaagactgtacaaatggatctcaatattttcataatatgatacggttaacatattcaaactgcctattaaaacaactcaacatgaaataacacttatttccataagtatgtccgaatacaaatataagaaaaacatgtatgttttcacactttttgcatattttttcgtccgcacccccaaaacggataaagaaagttttctacaagataaagcattcggaactcatgttttttatttatgtttgcgtaaaaaaacaaatgaactatacaacttacctctttgacttcgattacacgcttgccgattcttcacgcggcatcgtcacctgtttccgcaacgtgctgaaccgccacggctatacccacccgaccgacaacgacatcaaacgcaccatcggcaaaacgctggaagaatctttttccattctttccggcgtaaccgatacccgccagttggctgagttcaaaaaagaatatataaaagaggcagatacgcacatgaccgtcaataccgtgcttttccttgaaaccaagtcggtactggcagccttgaaagattcaggcgcccgcatcggaattatatccaccaaattccgttaccgcatcaaggagttgctggaccagcattttcccgaagactttcttgacatcatcatcggcggagaagatgtgcaaacgcccaaaccatcgccggaaggtctgctgcttgccatcaggcaactccatgtcaccaaggccgaaacactgtacatcggtgacagtacggtagatgcagaaaccgcacaaaaggccggagtggattttgcaggtatcacgcacggcatgaccaccgccgaagaactgaagaaatacccgcacaagaaaataatgagcagcctggaagaattgttagaacgggaaccattgcccgccgctgcatccccaaggaacatcagtgtacgtcgcattgcgcttctgctgctcctctttgctgcattcgccgctttcttttgctttctcatctttatataatgcttaaggaaataccttgccacaattaaatcgttccgctatggagaaagttttgttctgccatggtggaacaaaatttcctccacggtggaacagaatgttctccacgatggaacgaataagccttcgcatctccaccgcttaacggcactcccggaacatcccggcttatggagaagcatttgtttaagcacgaaatattaattgtctaaaaaaagagaaagaaagatttgtccgttccaaataaaagaggtaattttgtgcccgattattccgcaccgggtttaattaagtgtattctaagtgattagagaccacccgacggagctaacttatacattatatataagaaatgtacgcaattgtagaaatcaacggccagcaattcaaagcagaagttggcaagaaactgtttgtacaccacatgcaaaacgctgaagccggtgcaacagtagaattcgagaaagttcttttggtagacaaagacggcaacatcactgtaggtgctcctactgtagaaggcgcaaagatagtttgcgaagttgtttccggtttggtaaaaggtgacaaggttcttgttttccacaagaaaagaagaaaaggatatcgcaaactgaacggtcaccgtcagcaattcacagagttaacaattaaggaagtagtagcttaatcaaattaaaacagtaagaagaaatggcacataaaaaaggtgtcggtagttctaagaacggccgcgaatcacagagcaagagattaggcgttaagatatttggtggcgaagcttgcaaggcaggtaacatcatcgttcgtcaaagaggtactgaattccatccgggtaacaacatcggtatgggtaaagaccacactcttttcgccttggtagacggaactgtacagttcaaagtaggtagagaagacagaagattcgtttctgttattcctgccgaaaatgcagaagcataagtttccggacaaaaaataaagcgaagggatgcaatctgtctgattgcatccctttctttttaagcgcaaaaataaacaagtttcttttttgtaatacttttgatttgcactatctttgccctcacaaatccggaatatcataaaaacaagtataagatatgcttaccattaaacaaattacagacaataccgacgcggtaatccgcggactggagaaaaagcacttcaaaaacgccaaagaaaccattgagcaagtgctggaaaccaacaacaaacgacgcaatacccaaacaatcttagataagaacctgtcggaagtcaattccctgtccaaatctatcggaatgctgatgaaagagggcaagaaagacgaggcagagactgccaaaaaccgtgtagccgaattgaaagaagccaacaaggcattgcaggaagaaatggaccaagctgcaaccgacctgcagaacctgctctatacaattcccaatgttccttacgacagcgtacccgaaggtgtaggcgccgacgacaatgtggttgaaaaaatgggcggcatggaaaccgaacttcccaaagatgcgcttccacactgggaactggccaagaaatacgatctgatagactttgacctgggtgttaaaatcacgggtgcgggctttcctgtatataaaggaaaaggcgcacagctccaacgtgcgctcatcaacttcttcctggacgaggcacgcaagtcgggctatacggaaataatgccgccgacagtggtcaatgcggcttccggttacggaacaggccagttgcccgacaaagagggtcagatgtatcattgcgaagtggacgatttgtatctgattccgactgccgaagttcccgtaacgaatatctatcgcgatgtaattctcgacgagaaacagcttcctatcaaaaactgcgcttatacgcaatgtttccgtcgcgaagcaggctcatacggtaaagacgtgcgcggcttgaaccgtctgcacgaattctccaaagtagaattggtgcgcatcgacaagccggaacattccaaagagtctcatcaggaaatgctgaaccacgtggaaggactgctccagaaactggaactgccctatcgcatcctgcgtctgtgtggtggcgacatgagttttacagctgccctttgcttcgacttcgaggtgtactccgaagcacagaaacgctggctggaagtaagttcggtatccaacttcgacacttatcaggccaaccgcctgaaatgccgctaccgtacagcggaaaagaaaacagagctttgccacacactgaacggttctgcattggcattgccgcgtatcgtagcagcgctattggaaaacaaccagacaccggaaggtatccgcattccgaaagcactggttccgtatacaggatttgagatgattgactaaggaaacatcatttcctcattcaaaataataaaaggtgcgtcagaatataaaattcctattattctgacgcacctttcatacagagcagaaggctgaaagccttatatcttacaggaatgtgtgtcaaaactaaaatccccataattgtcccctcactccttaagtccctcttcctttaaaaggtcattctctatcctcaaaaccctttcatcccttccctctgcctcttttttcccctgcacattctttgttattaacaaataacccgtatctttgcataatctatcattctgaaagaaatcgcgtaattacaccaacaaaattataagataatgaataaaatcattagcaaagaacatttctctgaaaaggtcttcaaattagtaattgaagcaccgttaattgctaaatcgcgcaaggcaggacactttgtaatagtacgtgtaggcgaaaaaggcgagcgcatgccgctgaccattgccgctgccgaccctgtaaagggaactatcactttggttgtacaggaagtaggtctctcatctacccgcttgtgtgagctgaatgaaggtgattatataaccgatgttgtcggtccactgggacaagccacccatatcgagaacttcggaactgttgtttgcgccggtggcggtgtgggtgtagccccgatgcttcccatcgtgcaggcattgaaagctgccggtaaccgtgtgattacagtactggcaggacgcaccaaagagctgattatccttgaaaaagagatgcgcgaaagctccgacgaggtcattatcatgacggacgacggttcatacggccgtaaaggtttggttacggaaggtgtggaagatgttatcaaacgcgagaaagtagacaaatgcttctgtatcggcccggccattatgatgaaattcgtttgtttgctgacaaagaaatacgaaatacccaccgatgtatccttgaataccatcatggtagacggaaccggtatgtgcggcgcctgccgcatcaccatcggcggtaaaaccaaatttgtatgcgtagacggtcccgaattcgacggtcaccaggtagatttcgacgaaatgctgaaacgcatgggtgcattcaaaaatatcgaacgcgaagaaatgcataaactggaagaaccgcaaacttgtcaggcaactggcgaaaatactcaggcagaagatgaaaaaagccgcaatgccgcctggcgtcaagaactgcgcaaatccatgaaagccaaagagcgtactgccattccccgcgtggaaatgaacgagttggatgcggaataccgttcgcacagccgcaaggaagaagtgaaccggggattgaccgaggaacaggctttaacagaggctaaacgttgtttggactgcgccaatccggggtgcatggagggttgccccgtaggtatagacataccccgtttcatcaagaatatagaacgcggcgagtttctggaagcagccaaaacattgaaagagaccagcgcattgcccgctgtttgcggtcgtgtgtgtccgcaggaaaagcaatgcgaatccaaatgtatccacttaaagatgaacgaaaaaccggtagccatcggttatctggaacgcttcgccgcagattacgagcgggaaagcggacaaatctccgtaccggaaatcaaagaaaagaacggcattaagattgctgtaatcggttcgggacccgccggtctgtctttcgccggagatatggcgaaatatggttacgatgttaccgtattcgaggcactgcacgaaatcggcggcgtattgaaatacggtatccccgagtttcgtctgcccaacaagattgtggatgtagaaatcgagaaccttgcccaaatgggtgtgaagtttatcaaggactgcatcattggcaagacattaagcgtagaacaactggaagaagaagggttcaaaggcatattcgtcgcttccggtgccggactgccgaacttcatgaacatccccggcgaaaactccatcaatatcctatcgtccaacgaatacctgacgcgcgtcaacctgatggatgccgccagcgaagattccgatacgcctgtgcctttcggtaaatgcgtagccgttatcggtggcggtaacacggctatggactccgtccgcacagcccgccgcctgggcgccgaacgcgctatgattatctaccgccgttcggaagaagaaatgcccgcacgtatcgaggaagtgaaacatgccaaggaagaaggtgtggaattccttacactccacaacccgatagaatacattgccgacgagcaaggaaaagtaaaacaggtggttcttcaaaaaatggaactgggtgaacccgatgcatccggacgccgcagtcctgtccccattccgggagctaccgaaacgattgacatagaccttgctattgtcagcgtgggtgtatcgcctaatccgattgttccgagttctatcaaaggacttgaattggggcgcaaaggtacgattgccgtaaacgacaacatgcagtcgtccataccgaccatttatgccggtggcgacattgtccgcggcggtgctaccgtaatcctcgctatgggcgacgggcggaaagccgctgcagcgatgaatgaacaactgaagaactaaagaagcttcaccataaaaagaaagaaagcgtatcgcaatgaacgatacgctttctttttctttctatctgatacagaacttatttcaccaccttgtttgtcaccgggtcgggaaaaatcaccgtcggcttaaacgtcttggcctcttcaaagtccatcaatgcatacgacataataataacaatgtcatccggttgaaccctgcgggctgccgcgccgttcaaacagattttgcccgaaccgcgctcgcctttaatgatgtaagtttcaaaacgttcaccgttattattgtcggcaatataaaccttctcgccggcaatcatgttagcggcatccatcaaatcctcgtcaatcgtgatgctccccatataattgaggttggcttccgtaacacgggcacaatggattttagacttcaacacttcaatcatcataagattggcttttttatgtttattattccttatacttgatattgtcaatcagacggacttctccgcagaacaccgtaatgcagcccacggcatacgaggtatcttcccaatcggcaatcctctgcaacgtgttaccgtccaccagttcaaagtattccagacgcaagccgggagcggctgcaatggtatcttccacaaacttctgtgtctcagcaaccgtatgcgaagccgcaaaggtacgactttcaaataaagtctgcgaaattttcaaggcatttttgcgttcctcgtcagacaaacgggcattgcggctactcagcgccaagccgtcttcctcacgtacgatgggacaacctacaatctccaacggatacttcatctgacgcaccatttcacggataatgaccaattgctgaaaatccttctcaccaaaataggcgcgatccggctgcagcgcatcaaacaacttgctcacaatctgacacacaccgttaaagtgtcccggacgaaaggctccctccattaccgtgtccaaaggtgcgtagctgaatcggcgcgtatccggttccggatacatctcctccactgccggagcaaaaacaaacgcagccccacattcttccagcaaacgacaatcagcttccggcgtacggggatatttgattaaatcattctggtcattaaactgagtaggatttacaaaaacactgactacagtggcatcattctccgccacacaacgttttaccaatgaagcatgaccggcatgcaaggcccccatcgtaggtaccaagccgaccttcttaccctgggctctcatagccgaaagtccggcctgcaagtccttgatagtatgtactatttccatttttattggttatataataacttagttgttcgcaaaacgatgcaaaataagctattatttaccacataaagaagaaatatcataaattaatgcaaaagtcattccatacccaaagctgtatccagtcctttttatcgctgatatacaaacagttaacaattcataaggaattatagatgagctcgtcttgctttattgcccgattttttttatatctttgcagaataattgagaacatcgttattatgacaaaagcgaacaaggttttatttataacacaagaaattaccccttacgtttcagaatccgaaatgtcccttgttggcagaaacctgccgcaagcaatccaagaaaaaggcagagaaatcagaacgtttatgcccaaatggggaaacatcaacgaacgcagaaaccaattgcacgaagtgatacgtctctccggcatgaaccttatcattgacgataccgaccatccgcttatcattaaagtagcttccatacagtctgcccgcatgcaagtttactttatcgacaacgacgattactttcagaaccgcctgcaagtggttgatgagaacggcgttgaatatgaagacaacgatgcacgcgctattttttatgcacgcggtgtattggaaacagtcaagaaactgcgttggtgtccggacgtcatccactgccacggctggatgactgcattagcaccgctgtatatcaagaaagcgtataaagacgaaccgtcattcagagatgcaaaagttgtcttttcactttatgacaatgacttcaaggaaccgttccatcccgattttgccagcaagcttcttctgaagggtatcagtaagaaagacgttgccgatttgaaagagccggttgactatacagccctctgcaaactggcggtggattattccgacggtgtcatccagcaaagcgaacacgtgaatgaggaagtgatagcatatgcccgccaaatcggcaagcctgtcttaggctatcaatctcccgaaatctttgcagatgcctgcaacgacttctacgaccaggtttggggagcagaataaaaataaagtatcaatacgaagaattatgaaagtaaaatatttagggatattgctttttgcaattctggctttctacggatgcgatgacaataccggcacattgggcatgagcatgttacctgattctgacggtatttcagccacaactacgacttttgatgtcaccaccaaatctctccttgcagaaaaagtttatgccaagacaagtacgggatatgtaggtaaattcacagatcctgctcccgaaggttttggaagctacgaagccagcttcctgactgagctgaactgtacggacgacttcaaattccccgcagtatacgacccggaaaagcatgtgggaacaatggcgggtgataccgtcgtttcagcacagttgacaatatactactcttcatggttcggagattccttaaatccatgcagaatgtcggtatatgagctggacaaaagattagaaaacaagcactataccgatattaatccgaaagaatattacggaaacgaaactgacaagccgcattttgaaaaaaccggttattttgagttacacaaagcatatactgcttacgatacctctgttcccgactctgtaagaaatgctaccgactctaatggaaacagtcttttttatcccaatgtaactctgcctctaagcaagcagtttggaaatgaactcctgcagttgaacagagcctaccaaagaggagaaaacgatttcttcaaaaactcggagaagtttattgacaatgtattgaaaggagtctatattaagacggattacggagacggaacaattttatacgttgaccgtgtggacctgcaaatgcaattccgctttcattacgtagacagcttaggagtgaagctcaccaaaaaagacggtaaagactctttatattatagtacggcaacagtgtttgcctccaccaaagaagttattcaagccaataagtttgaaagttccgaggaattaatcaagaaagcgaatgagaccggttggagttatctcaaatcgcctgcaggtatctttacagaggcaaccttgccctatgataaaatacatgaagagttatcaaacgacacgctgaatgcagtcaagctgactttcacaaactataatcaggaaagtaacaagtataaattcagcatgagtgcacctcaaaccgtactgttgctgcgtaaaaaagacatggactctttctttgtcaacaacgaactggcaaacaatgtcacctcttttgtcgcaactcacaacagtatcgaaaccaaccaatatacctttatgaatatagcccgtctggtttctgcttgcatcaatgaaaaaaaaaccgccaaacagaaagccaaagaagcggcaggtacatcgtggaatgaaactgcatgggaaacagaatggagcgaaggcgaaggaaaggattgggataaagtagtaataatccctgttgttgtgacctacgatacaaacagcagtactccttccataattggtatccagcatgacttgaagcctacgtatgccaagctgaaaggtggagacccggaacagggtggaaccaaattgcaaatagaggttacatatacttctttcaataagtaaaaaaagcaggagcttagattctatatctttataaaccaaaatcttcatttataaaaaccgaagtttagtttttataaatgaagattttggtttatagtttactttaaagaaagagaaggttctgacataagcagaatagaattaatccaagctacaaaaaaagtcctccatactctcaaataaagcatggaggactaacattatctaaagccggatagtgctatttggcagacttgacagcaggcttctttgccgtaactttctttgcagtagactttgtagcaggtttagaagtatctttcggttcttttttcttctcagccgctttttccttttccaacttcttctgcgttttttccagctctttatgaagagcttctatctcatccccctgattcttgattgtagtaagcaaagcattcagctcctcgttatcaatatccaccggatagagggaatcaacacgcttgataaagtctcccaaaatattcatatagttggtgaaagcatcatacggcgattcgtagataccacggttcaaccctactccgctattcttagtcgtcataaagcggaagttgttgctggcctgcaaataatcccaatcctgcttgatgcggcggtcatcacagatatgtacacgctcggccacactatacagtttattgaaagcctcacgctgcattacattacccaaccagcaacttgtatctctttcttcatccacccacgacataggataaggtacatccaattgtgaaacggatttcaacttggtaacaatttcggtaggagttgagaatgtaatgcctttttccttagcacatgcaggcaatgccttcaggaattccagaatattggaggataaaggctgtgacatccctaatgaacaaagctccataaatatgttgataacctgctcctcttgcgggaacgcatcgatccaactgatatatttatcggcaaacagcggatattcgttccactcggaattcgagaaacgcaaactaatatcatccgacagtttaaaatcgcgcaagagcaactttaaattcggattcatattacaatggtacacatagtgcggactcttccagccaagcacatgttttgctccttcagtcagcattcccttaaagcccatacttgccaccatggcaccaatttcgtcattgtaaatcagactggagttacggaacaccttgggtgctttgccaaacatttgtttcattttggcactctgacgcatcacctcttccttgaagcaatcttcattagctaaagaagaaagtccatgagagtacggttcagccaagaactcacagcatcccgtatcattgagctggtgcaataggtcgattacagcaggtgcatggatttccagttgctccaatgccacacctgagatggataaagccactttaaacgcaccacccgaatccttcaccatcccaataagcgtattcagtgcaggaatatacgaacgttcggcaacttcattaatacttgtttcattggcataatcatcataatagtaatggtttgtaccaatatcaaagaaacgataacgtttcagatgtataatttgatgtatctcaaaataaagacagatagttctcattagtatttgttgttttattatttaccatagtttcttaacacatcctcgtaaagagcacggattctcaagcctaccttttcccaggtaattccgtccacttctttctttccttcttcctgaagataatggaataaagacggattcatacagatggaataaatagcatccgccatagcatgaatatcccaataatcggtcttaattaccttatcgaggatttcaccacatccggactgcttggaaatgatagagggagttccgcactgcatggcttccaacggggcgataccgaaaggctcggaaacggaaggcataacgaatacatcactattcttataaacttcgtacacttgtttacctttcataaagccgggaaaatggaaacggtctgcaatgccacgttcggcagccatattaatcatggcattcagcatatcacccgaaccggccatcacaaagcggatgttgcgggtacgttgcaacaccagtgcagcagcttccacaaaatactccggacctttctgcatagtgatacgtccgaggaaagtcacgaccttctctttcgaatgttcaggacgcggaatatcctggtattcttgcgaaagcggatataccgcattatgcatggcaaatacctttctcggatcttgatgatactcgttgataacagtacgacgggtaagttccgacacacacataatgcagtcggcataatccattccgtttttttccatggaataaacagtggggttaaccttcccccgcgaacggtcaaaatctgttgcatgcacatggatacagagcggtttgccactcaccatcttcgcatgtacaccagccggatatgtcagccaatcgtgcgcatgaataatgtcgaattcctgttgacgtgccacaactccggctataatcgagaagttattgatttcttcgtgcaaatttccgggataaccgccggcaaagtccatacaaccaagatcattgacgtgcatataggagaaatccgagtaaatatggtcgcgcaaagcataatattgctccggactcattgtcgacaaacgagacttcaaataatcgtaatcaacatcacgccacacgataggcacctggttcataccgattatattcaagaatttctcttcttcacctgtaggcttaggcatacagaaagtagtctccacatctccctgcagactcaagcccttagtgattccgtatgatgcaactgcaaggccaccatatattttgggaggaaattcccaaccaaacattaaaactttcatcttcgttcctcctcctataaattatacttagacaacaatttcaagatacgcagaatctccgccacattcatggcgaacgataccgcgcctcttcctttaaacggcggatttccatcgaataactcgggcagagaacctatgcaatggctcgtcatctcatcttcaaaaccaatcagataccgctctacaaacgaaataccactcatcttatatatacgcaggtacgcttccatataaaagcccataagccacggccaggctgtgccttgatggtatgcgtaatctctctgaatctgaggaccgacataatttggattataccccccactcttagggctcaatgtacgcagacctttcggagtcagcaattcttttgtcacaatatcaagtacctgcttcttctgtgccctatccaatggagaatagtcaaaagcaacagcaaatatcatattgggacgaacactccaatccatcatataaccgtctacataatcaaacagataaccgtactcattacgaaaaacttccacaaacgattttcctgttatttctgcttgagcatccaatttgtctgcaagaatgtcattcccaccctcacgcacaatgtccgcaacaaaacgcaaagcattataccacagcgaattcacctcaacgatatacccggtgcgagggattacaggatgcccgttaaccgtagagttcatccaggtaactgccttttccttgccatttgcgtaaagcaaaccgttttcatgcaagaaaagattatcatgcttacgagcgcagatataattcataatatcctccaataacctgccgtatttcaaacggcattgttcgcgcgatgtatccttggcatactgctgtaaagcccatactgcccataaaagcacgtcaggatgttccatctcatatattttataaccaaccggtttatcctcaatgaaagcatagatagccttttccgccgttctcataacatcctcgaattcatcttgttcgtccacggccaaagttaagcccggtaaagagataaacaagtcgcgcgcacggcatttaaaccagggatagcctgcaagtacataatgttcttctccttgtttattgtggaactggtgagccgaatttttcaaacagtgataaaaactgtcacgtggagtacggtcttctgcctcagcctcaaaagtctgctttagcttacgcggtgaaatttcggagatacccgcagagaaaacgatactttcacccttctttatatctacttcaaaataaccgggtacatacaggtcttcattaaaatcgtaaccgcgttcctgttctttcgggtattcaatgccacgataccaatccggctgataatgaaattcgttctttttgttcaactgcatataaagttccggataaccgggatacatacaggttttaataccgttttccaccggttggtaatcacggcttgcctgtgcattttcgtgcgtgtattcgcgtacgctgcggaatgccaaaaagggacggaaccgaagtgttgttgccgaatgggcatcgaccaaggtgtaacgaatcagtatccggttctcatgatgtacaaaaattttctctttgcggagaataacgcctcccacacggtaagtagttgccgggatatgctcgcaatcaaactcacggatatacttatgtccgttcggactaaaattatttccctgatacttgtgcaatcccaagttaaactctgcaccgtgctgaatcactgtttcatccaaagaagacagcagcacatggttttcatcatccaggttgggaacgggaattaccaacaagccgtgatatttgcgtgtgttacaatctacaatcgttgtacaatgataggctcctgatttgttagtccgaagtatctcccttggcaaagattcttgcagattaaccatcaaggtcttgtcaaatcgtaaataactcatagttgtgcattatttaaaggttaattatttcaggtatatgcgctacaaagcttgtagcaatgcccaaaaatacgaattaaagcctacacgcaaaataaaaagtcttttttttttcgcttttcaagcaaataatccaaagcattgtacgaaaatgataaatccctgtacaatataggaagcatgacgggctacaaatagttctggcgatggtataccactattttcatttattcgcttcatccacacttggattcttagaagcagggatagaccgggaatttcaacacacggcaagttgccctatgatgcctttcaatatctttctttatggaaagctgttacaattccttctacacagaaaaaagaaaagaagaactaatgacggaagctatccaacagcaatgaaatatttgccataaacaaacgcactgaaattgctaacaggataatgccaaaaaatttacggataatataaatgccgcctttacccaaaaaacgttctaccctcccggtcatgctgacaacaaaatatacccatatcatattcaaaactaatgcaatgataatattgatactggcatattctgcacgcaaagagagtaaagttgtaaaggctcccgctcctgccaatagcggaaagaccagcggaaccagcgttgcttctttaatcggcccctggtttttaaagatttcaatatcaagaatcatttccagcgacatcagaaaaataacaaacgcaccggccaccgcaaatgactcaatgtccacatgaaacaatttcagcatcatatcacccgcataaaagaaaccaatcagcaaggcaaacgatattaatgtagctttcagcgcatttacatctttccccttttctttcaaattgataataataggaatagagcctataatatctatcacggcaaacagcacgataaaagcacttgtcatctgctgccaattaaatgctgaaaacatatgtccctccttttttctacaaaaataatctatttttatgtatttcgcaatatttcttaaaagtgaatgagtagcacgtttaagaaataataaaaaaaacaaaaagaaagggcaagtgtttacggcagagttcgattatatctacttttgttcttaaaccagaagatgagaatgatatggaaacaatgtttgatacgttattacaattacccctgtttcagggacttgcccaagaagacttcacccgtattttggaaaaggtcaaattgcacttcacaaaatataaaccaggtgagcttcttttaaaagaggggggcgcctgtcatgaactggtcttcgtcctaaaaggagaaattgcatcttccacatcatccgccgattcttcttactgcttcaccgaatattttccagcccctttcctgattgaggctcactccatattcggcatgaaaacgcattatgcttctacatatcgggcaagaaccgaagtgcatacggtcagcatcagcaaagcatttgtagtgaaagagctcttcaactacgaaatattccgcttgaattacatgaatatcatcagtaaccgcactcaaatgctgcataaccgcttatgggctgtattcggcaatagtcccgaaagccgcattatccatttcatcctcagtcatacagaacggctgtcgggcgaaaaaatattgaaaataaaaatggaggatttggctcaaatcatcaacgaaacccgaacaggagtgtcaaaagccctcaatactatgcaaacaaaaggattggttgaattacaccgcggggaaatcatactgcctaatgttgaaaatttgataaactgaccaagtacataaaatgcaaatatcttcaagaagattattaaaatgaaatgaaccccgaaaattaaataactttcggggttcacttcataatctttgctttaatatatcttcagcaaccgtttttattcccattcaattgtggaaggcggttttgacgatatatcataggttacacggtttacacctttcaccttattaataatgtcattggaaaccttgcccaaaaattcgtaaggcaaatgcgcccagtctgcagtcattgcgtctgtggaagtaacagcacgtaaagcgaccgcacgttcatatgtacgttcatcacccattacgcctacagactgcacaggaagtaaaataacccctgcctgccatacctgatgataaagagttgtctcatttcctccggcatctttcactttccaattgcgcaatccctgaataaaaatatcatccgcatcttgcaggatactcaccttttccggagttatatcacccaaaatacgaacagccaatcccggaccggggaaaggatgacgggtaatcaaatgctccggcatgcccaactcacgtcctacacggcgaacctcatctttaaacaacagtcgcaagggttcgcacaatttcaggttcattttttcaggaagtccacctacattatgatgactcttgattacagttccggtaatagaaagcgactcgatgcagtccggatagatcgttccttgagccagccatttcacatctttaattttatgagcctcttcatcgaatacatcaatgaaacccttacctataatcttacgcttcttttcaggttcggtcactcctgccaattccgcaaagaatttagcgcttgcatccactccgataacattcagaccaagacattcataatcgtgcaatacatttttaaattcatctttgcgcaacatgccatgatccacaaaaatacaagttaaattctttccgatagcacgattcagcaatacagcagcaacagaagagtcaacgccaccgctcaaaccgagcacgactttatcatcccccaattgttccttcaactgggcaaccgtagtttcgataaacgaagctgcgctccagtcctgcctgcaaccgcagacttccactacaaagtttttcagcatctgtgtaccgtcctcgctatggaatacttccggatggaattgtacaccccacattttctctccttccacctgataagcggcaatcttcactttatccgtagaagctatagtcttgaagctttcaggaatggcagtaatagtatcgccatgactcatccacacttgagtattttcctttactcccttaaaaagcacattgtttttatcaaaagaagctaaatgcgcccgtccatattcacggctacccgcaggttcaaccttaccgccgttggtataggctataaactgtgcaccgtagcagattcccaatataggatatttaccacggatttcgtttaaatctatcttaaacgcactttcgtcatatacggaaaatggactacctgaaagaataactccttttacactcgcatctccctgaggaaatttgttgtaaggcacaatttcacaatatacattcaactcgcgaacacggcgaccgataagctgcgtggtctgtgagccgaaatcaagaataataatcttttcttgcatagaaacagaggtgttagtaatttggagcacaaagatacgaatttgtttagagcagaaagcaaaatatggcaaaatttgttcagagcaaaaaacaaaatacggcaatatacagagaacggaaaacacctgcaccgcttatctttcaagaaactaaaggatttgttggatttataaaataaagaatttatatttgtctctgttactaaaccaaatatctaagtatcatgaaaagaaatatcctatcagcggtccttacactttactgcctattgccgatagcagcacagcccctttccaaagcagattcgctacaaattgaaattgctcaattagaaaatgcactgacaagcatacagactgatttgcaagaaaaaactttgcagtacaattgggaaataacagaaaaatacattgaatattgcaagaaactctacaaaatcaccaacttcaaccgagaaccccggttgatacaacttgccactaccataaaaccggaagaactggaacctcagagattagcctacgaaaaggctaaaaaagaacttgaagcactattgacatcctacccggagtatatcaccctcgattctttatataaaagagccatcaatacggaacagaaaaaagaccgcaaagttgccttggacggtttctatcaacgcatatacaatgaggataagacttaccgtccgttgctcgaaaaaaaacgcaaagccttcaaagagcattatatagcctgtgcttcctatctactggacgaatgtaaaagaaaccgggaagttgtaccggaaatctatgattataaaacagcacgaattctcaaagagaccgatcccaagctccaccaactatccatagagatcagtacacttgaaagccttcaacgggaaacaattcgtaaatatcagagattaaagtacaacctgaaagaagactaggcaataatccttttttaatcctataaaatcaaatatcctcgaaagaagcattaccatcttccgaggatatttatatatgaatttctttattatttaaataaaaaaacgtgattatttttctttcaatatatcacgaatttccgtcaacagcacttcttccttacttggtgcgggcggtgcaggaggagcagcaggcgtttccgcttttttcttttccgtcagcttggttatcaacttaataaacataaagatagaaaaagcgataatgagaaagtcgaaagtggcctgcaggaaatttccgtaattcagtgttacagcggctatctccttgccatccactacttcggcaggcttcatcacccattttaaatcggtaaagtttacaccgcctatcagcaagcccaaaggaggcattatcacatcagccacaactgaagatacaatcttgccaaacgcacctccaatgataacaccgacagccatatcgaccacattgcctttcatggcaaaagccttaaattcctgtaaaaatgaactttttcccatcttttcaattatttaattatgattttggatacgaatataaaaacattttcttacttttgcagcgcaattcgtaaaagagatgctgtaaaagtttaaaagtttaattttaaacattataaaacccttaaaagtttaaacaaaatgattaaagtaggtattaatggattcggacgtatcggacgtttcgtattccgcgctgctcagaaaagaaacgatattcaaatcgttggtattaacgacctttgcccggtagattacttggcttacatgctgaagtatgatactatgcacggtcaattcgacggtactatcgaagctgatgttgaaaacagcaaactgatcgttaacggtcaatctatccgtatcactgctgaaaagaacccggctgacctgaaatggaacgaagtaggtgctgaatacgtagttgaatctaccggtttgttcctgactaaggaaaaagctcaggctcacatcgaagctggtgcaaaatacgttgtaatgtctgctccttctaaggatgacactccgatgttcgtttgcggtgttaacgaaaagacttatgttaagggtactcaattcgtatctaacgcttcttgtactactaactgcttggctcctatcgctaaagtattgaacgataaatggggtatcactgacggtttgatgactacagttcactctacaactgctactcagaaaacagttgacggtccttctatgaaagactggagaggtggtcgtgctgctgcaggcaacatcattccttcttctactggtgctgctaaggctgtaggtaaagttattccggctttgaacggtaaactgactggtatgtctatgcgtgttccgactttggacgtttctgtagttgacttgactgttaacttggctaaaccggctacttacgctgaaatctgcgctgccatgaaagaagcttctgaaggcgaactgaaaggtgttctaggttacactgaagatgcagttgtttcttctgatttcttgggtgacactcgcacttctatcttcgatgctaaggcaggtatcgctttgactgatactttcgttaaagttgtatcttggtacgacaacgaaatcggttattctaacaaggttcttgacctgattgctcacatggcatctgttaactgctaatatacagttagaaaataataaaaaataggcggcttcttttatgaagtcgcctattttttttgcacatttgcaattaatttattttcttcaagagataagtatatgacaagacttaaacttacactaatattactttgttttatgactatgatacaagcctcaaatcctttctttgaaaagtattcaactccacatggaactgttccttttaatctgataaagactgaacattacgcacctgccatacatgaaggcatccgccggcaaaatgcagaaatagatgcgatcatcaataaccctgctgctccgacttttgaaaacacgatagtgccctacgagaagtccggagaactgttgcatcgtgtcactaccgtattcggcaatctgctcagcgccgaaaccagcgatgaattgcaggaacttgcccgggaaatcatgccactgatgagcgaacatgaaaacaacatcagcctcaacgaaaagctatttgcccgcatcaaagccgcatatgagctgacagacaagaataaacttactccggaacagtccaagctactggaagacatctacaccggctttgtccgcaacggagcaaacctgcaaggagatgccaaggaaaagtaccgtaaattgtgcaaagaattaagcttgttgacactgcagttcagtgaaaatgccctgaaagagacaaacgactaccaattggtgctgaccaataagtcacagttgtccggtctgcctgaaagcgccgttgatgccgccgcagagacagcgcaggaaaaaggtgtgaaaggttgggtattcaccctgcatgccccaagttacagccctttcatgacgtacgccgacaaccgcgacctgcgccaagaactttacatggcatataataccaaatgcacgcatgacaatgcctgcaacaatctggaaatcgtaaagaaaattgccaacgtccgcatggaaatcgcccaactgctgggttacgacaactttgccgaatacaacctgaaagaacgaatggcacaaaacagcgacgctgtatacaaactgctgaaccaactgttagaagcatatacacccaccgcacaaaaagaatatgctgaagtgcaggcactggcacgcaacgaagaaggagaaagcttcaatctcatgccatgggactggagttactattcccaaaagctgaaagaccggaagttcagtgttaatgatgaaatgcttcgtccctactttgagctaagcaaagttaaagaaggagtattcggactggcaagcaggctgtacggcatcacattcaagaagaatcccggcattcctgtttatcacaaggatgtggaagcctacgaagtatttgataaagacggcacatatcttgccgtactctatacagactttcatcccagagccggaaaacgctccggtgcatggatgacgagctacaaagggcagtggacagatgagaaaagcggcgaaaacagccgtccgcacgtatctatcgtgatgaattttaccaaacccacacaaaacaagcccgccctactgaccttcgatgaagtggaaactttcctgcacgagttcgggcacagcttgcacgagatatttgccaactccacttacgaaagtttaagcggcacaaatgtttattgggactttgtagaactgccttctcagttcatggaaaactttgccattgaaaaagagttcctgcacacctttgcccgccactaccaaaccggcgaactcatccccgacgaactggtgcagcgcattgtagactcatcgaatttcaacgtggcctatgcctgcctgcgccaagtaagtttcggattgctggatatggcatggtatacacgcaatacccctttcgaaggggatgttaaagcttatgagaagaaggcttgggataaagcacaaatactccctgttgtagaggaaacctgtatgagcacccagttctcacacatttttgcgggcggatattctgctgggtattacagctataaatgggcggaagtgctggatgcggatgctttctcgctgttcaagcaatgcggcattttcaatccggaaatagccgactctttccgccggaatatcctgtcgaaaggaggtacggaacatcccatgacactctacaagcgtttccgtggacaagaacctaccatagatgcgctattaatcagaaacggaataaaaagatgaaagaaaaaattaaaataaagacaatagtctgttgcctgatgatgacatccatgcttctcggcttgggcgcttgcaacaatgaggatgatgtaatggaaatcttcaacaacaaaacctggaaattggttcgtatcgccaccgaaaaaggaaaagaacaattctatcaaggcttgtggagcaacgaaagtaaagaagaaatcgaccgtgaactcaatactttcggggcagaaggaaactacactcttaattttaactgtgccgaagtgaacggagaagttaccggtacggttaatgtccatgccgtcaactcgagtatcaatgatgcagttctgaaaatagacggaaaggaacataccataagcatcaaaggaaaagttattggtacagaaagcgacaagttggctaaagtatttatcaacggtatacagaatgtgttcaaatacgaaggggatatacataatattactctttacttcaaagacggaaatacaacaaaagtcatgggatttacagcccgctaaatacaactgaaatatggacgaaaccaagagaagtaaacaagaagccttagacaaacgttatatacgcatggcaagcatatgggcggaaaactcatactgtcaacgtcgtcaggtgggtgcactcatcgtaaaggataaaatgattatctcggacggatataacggcacgccatccggttttgagaatgtatgtgaagatgaaaacaatctcaccaaaccctatgtgctccatgccgaagccaatgccattaccaaaatagcacgctccaacaacagcagcagcggtgccacaatgtacgtcacggcctctccctgtatagaatgtgccaaactcatcatccaggcaggaatcaagcgtgtcgtatactccgaaaaatatcgtttggaagacggcatcgaactgctgaaacgtgcaggtatcgaagtaatatatatgtcaattgagagttgataacttcgtgcacagccaaatagtaaatcgtaaaatatagtacatatcattatgggtacaaaaaactcttcccgtttcacacctctcattattgcaatcagtgtagtagcgggcatacttatcggaactttttatgccaaacatttcgcaggaaaccgtttggggattatcaacggttcgtccaacaagctgaatgcgttactgcgggtggtagacgaccagtatgtggacagcgtcaacatgaccgatctggtagaaaaagcaatgccacagatattggcagaacttgacccacactccacttatattcccgcacagaaattggaagcagtcaattctgaactggaaggcagcttcagcggtatcggtatccagtttaccatacaagaagataccatacacgtgaacagcgtaatacaaggcggtccgtctgaaaaagtaggactcatggcaggtgaccgcattgttatggtaaacgacagcctgttcgttggtaaagggctgactaatgaaaaagccatgcgcaatctgaaaggacctaaaggcacacaagtgaagttaggagtgaagcgcgccaccgaaaaagagctgttggatttcaccattacacgcggcgacattccccagaacacgattgatgccgcttatatgctcaacgatgatttcggctacatacaagtcagcaagttcgggcgtacctcacacgtagaactgctgaatgccattgcccagctaagccatcaaaaatgtaaaggtttcatcatcgacctgcgtggtaataccggcggttacatggaagccgccacccgtatggtaaacgagttccttccggaagggaaactcattgtatatacacaaggacgtaaatatccgcgcatggaagagtatgccaacggtacgggtagctgccaaaagacaccgctcgttgtattggtagatgaaggttcggcttctgccagtgagatctttgcaggggctattcaggacaacgaccggggaactatcgttggacgccgttcttttggcaaaggcttggtacaacaacctattgatttcagtgacggttccgccattcgcctgactattgcccgctactatactccatccggacgttgcatccagcgtccctacgaaagcgggaaagactctaaatacgaaatggattggctgacccgctatgaacatggagagttcttctctaaagacagcatcaaactcgacgaaaacctgcgctactccaccagactgggacgtcccgtttacggcggtggcggcattatgcccgatgtattcgtaccccaagacacaaccggagtatcttcttatctgatagaggtcagcaacagggggttgattatacagttcagtttccaatacaccgaccgcaaccgtgccaagttgagtgcgttcgaaaatgaacaggatttactgaaatacctgcgccgccaaggtattgtagagcaattcatacgttttgccgattccaaaggagtgaaaagacgcaatctgctgatacaccgttcctataaattactggaacggaacctctacggcaatatcatctacaatacgttgggtaaagaagcctatatccgatatatcaacgagagtgacgctactgtaaagaaagcgttggaaatcctggaacgtggcgaagctttcccgaaagctccgctacaagccggccaagaagaggagaataccaatggaaaagaaaaaagaactgcgcaagcgtatagctttactgaagacccttcacaaatctaccgctacgcatcaatctgctgagatacttgccgctctcgaagcacatccggtctttagagcggcaagcattatattattatatcactcattgccggacgaagtacacacacatgacttcatcagaaaatggagtacaaagaaaaaaatactcctgcctgttgtcataggtaacgatttggaacttcgcgtatatacaagtcctgccgaccttgctattggagcgtatggtatcgaggagcctacgggagcattgttcaccgactatgccacaatagaccttgtcattgttccgggggtagcattcgaccgtgacggaaaccggctgggaagaggaaaggggtactacgaccggctgcttccccgcataccttccgcatacaaagtcggcatttgctttccgtttcaaatagtagaagaagttccggcagaaccattcgacatccgtatggacgaaatcataacacaacaatgaaaacaaactatcacactcataccacacgttgcatgcatgccgtcggaagcgatgaagaatatgttctcagcgctatcaaaggcggtttccagatacttggtttctccgaccataccccttggaagtaccgtaccagctacgtagccgatatgcgcatgcttcccgaggaattgccggagtatatagaaagcctgcaatatttacgagaaaaataccgggaacaaatcgacataaaaataggcttggaatgcgaatactttcccgaatatatcccttggctgaaagaacagattaaaaagtaccagttgaactacatccttttcggcaaccaccatttccacacggatgaaaaattcccttatttcggacatcacacagacaatcgggatatgctcgacttatacgaagagagtgctatcgaagggatggagagcggtctgtataattgtcttgcccaccctgacttattcatgcgctcttatcccaaattcgatcatcactgtgccacaatcagccgacatatctgtcggaccgcagcccggcttaacattccgttggaatataacatcggatatgtggcatacaatgaggaacacgggttaaacacctatccctgcccgaatttctggcacattgctgccaatgaaggatgcacagccattatcggtatggacgcgcacaataataacgatttagaagttcctatctattatgaacgtgccttacaagaactaaaggaattgaagattaaaaccacagatacattgaagatgatgtattaaaatgccaacagcaagtacgcatatcaccggaatataatgttagtaatcacctgcgcccccacatgccggttcagattacgtaccaacaaatctcttcccatcatcagttcctgacgaagggcagcagaagtaagatgcacgtacagcacctgattctttatataaagttcacgtgtataagaagcaatgaccggtcccaaaacttctgcccacgagttgatgagccgccgttcattcagcggagactccaaactctcctgcctcagaaagcttcgtatcagttttcctatctgttctgcatcattccgtttcatgcttcattttcctcaccaaccgctacctgggtctctaccatttccgaaatgttacctttctctacacggaacattttataatcactgcccaccttatgcagaatacgatccaaatgttcacgattggtatctgttataaagatctgtccaaagttatcacctgccaccagtttaattatctgctctacacgcgacgcatccaatttatcgaaaatgtcatccagcagcagtaacggaactgtggtacccgtccgtttcagaaagtcaaactgtgccagctttagagctaccagatacgttttattctgtccttgcgagccttcccttttaatagggaaatcacccagcaacatattcagttcatctttatgtatcccacgcagagaaaatcccattatctgatcccgcatacggttctcctttaatacagccaacaaagaagcgtcacgagcatgcgaatcataagttaacccgaccttctccttatcctgtgaaataaacgaataaaaagactggaaaataggaataaattccctgataaactcttcccgcttatggaataccacttcacctgcctgagccatcatctcctcccatactagaaaaagctcttcctccaccggcatctcactcttaagcaatgtattccgttgtgccaatgctttattataacgaatcaatgcatccaaatattctttgtcatactgtgaaatcactacatccataaaacggcgacgctcatcactgcctccacttatcaagaccgaatcggcaggagataccatcactaacggcaagaaaccaatatgatcggacaaacgtgtatactcctttttattccgcttgaattgcttcttctgacgacgcttcatgccgcaataaatttcttccggcgtaccatctgcagcttcgtaaaatccttgtataacgaaaaaatccgaatcatgccttatattctgcgaatcaataggattccccgcacttttgcagaaagaaagaaaataaacagcatccagcaagtttgtctttcccattccgttctgtccgaagaaagtatttagtttcggagaaaaagcaagttctacctgctccagatttttataattaagtatggatatgcgtttcagtatcatatgacagtttatcgttacttttcccagcaaatttagatataaatcacgatttatatgccagtgggatatgaaaaaatcaagaccacccctatctttatggcgtggaggtctcagtgtgtgagcctcaaaataaatgtttcacgagctcttagtctcaaaatgtaatagcctatgcggatagtatgtggtcttgacgtacacaaagatagtgtatttgtttgtattctcaacgaaaaaggtgagaaatttgaagccaagtacggtgttttgacacctgaactggaagagctgcatcaacttctccttactcatgaagttaaggaagttactatggaaagcaccagtatttactggtatcccatctggcgcattctcagtgacatagaatgtctgaagttggtcaacccctacttcatcaagcagcttcccggcagaaaaagtgatgtccgtgacgctgcctggatagccgaatgtaccatgaaggatctcatccgtggcagtttcgtgccggatgagatagtgcagcgcatgcgtcagtataaccgacgcatttttgacttgaacaaggagaaggtctataaactgaccaaactggatgccttgcttcaacgttgcaatatccgtatcagcaactacgtatcttctacagacagtaagagctacaaagatgtggtgaaattgctttccgaaggaattgtcaatgcggaaaagctgacggaggccatccatggacggacggtgaaccgtgtcggaaaagaagtaattacagccgctctgacaggagttgtcaatgaagtggacatagacctgatacgccagtaccgggaggaaatccttatggatgacaagcatctgaaagagtgccaggaaaaactgacggaaatctgcaggaaagagttccccagggagttcgataatcttcagacgatacccggtgtaaaggaacgctcggcaacctccatactctctgaattaggggccgacatgaagatgtttattacagcggctgcattggtgtcgtggtgcgggctcaaaccacggaatgaagaaagcgcaggaaaaatcaaatcacgaagaatcacacatggtaacaagtacatcagaaagactatgattgaatgcgcatggggagccagccggacacaaaactgtttttactcgaatttcagttacacacaaactgtcgtcagaaggaagaatgccatgaaagtgaaagtggccatagcgcggaaaatgcttgttgtcatttggcacgtgttgagtgatggtgttccatacaatgattataagaagcctgaagctattgcagaaggcaactcataatataccgcttattgtaaggccagtatctttgtggtagcatagactccgttttgcaaattgactgatgctttaagcggcttagaatgccagtgttaggaaataaagcctgaagaggaaaatgatactttttatattgtatatctgactgctcttgatagaacggtcaatacattcatgctcattaacaccataaactaagtaaaggagccataaagacaggggtaatctttatcttttcatagaggaaagataatacaaactgggagcagaataaaacgaatgcattcattttattctgccaaagtacaacttatcttcattgtatcttgaaagacaacgcaaaacaaaataaatctatggttttggaatacaaaataaaaaaagatgccgctaaatttcgttgatagctataaaaaacttacttttgcgggtcgaattagctattaatgaataataacaaaaagaatatataagaaatggcagaacaaaaaaagacgaacgaagccttaaacgtggaagacgcacttacacaatcagaggcatttctcatcaaaaacaaaaagacaattatcggtgctattttagctataatcatcattatagcaggtatagtaatgtacaagaacctctatgcagcacctcgtgaggaaaaagcacaggcagccctttttaaaggacaagaatattttgaagctgatgcttttgcagaagccctgaacggcgatagcatcggttacgtaggtttcatcaagatagccgaccaatacagcggtacagatgcagccaatcttgccaaggcatatgctggtctttgctatgcacatcttggcaaattcgatgaagccgtaaaagcattggagagctttgacggagatgaccaaatggtagctcctgcaatgaaaggcgctatgggtaattgctacgctcaactcggtcaactcgataaggcatcttccatgttgctgaaagcagctgatgaagcagataataatacacttagccctatctatctgaagcaagccggagaaattctggttaagcagggtaagtatgacgatgccatcaaagcatatacttctattaaggataaatacttccgttcatatcaagctatggacattgataaatacatcgaacaagctaagctcttaaagaagtaattcataccttatttataagatatttcgagcacggattacacggatatacacggaagtcaaaaccgtgagtgccgtgtaatccgtgctcttcatttatacgttccaatttatttaatttttaatctttaatttattatggctacagcttatcacaacctttcggattatgatttcaactcagtgcctagtgcagagaatatgaaattcggtattgtagtatccgaatggaattacaatatcaccggcgctcttttaaaaggagcagttgacaccttaaaaaaacacggagctaaagacgaaaatatcatggtaaaaaccgttcccggaagttttgaactaactttcggtgccaatcaacttatagaatacagcgaagttgatgctgtaattgcaattggttgcgtagttcgtggagaaacaccgcattttgattacgtttgcatgggtgcaactcaaggcatcactcaattaaatgcaagtggcgatgttccagtaatttacggattaattaccaccaatacaatggagcaagcggaggatcgcgcaggcggcaagctgggtaataaaggtgatgaatgtgcaattactgcaataaaaatgatagattttgcttggagtttacaaaaatagttgtacctttgcatcgcaattgagaaacaaagctgcttaaagagagatttaaagtagttctcaacagcaaaagggcaaataccagagtggccaaatggggcagactgtaaatctgctggcttacgccttcggtggttcgaatccatctttgcccactaaaattgcggaagtagctcagttgatagagcattagccttccaagctgagggtcgcgggtttgagccccgtcttccgctcttctgaaaatcagatagttatcgaaagatttctatctgatttttgtttttagacaatggcggtttggctatggtttaaccgagtgagttcaaccaagagttcaaccaaaatcttataaacgcaacgattaatgtagtatgctataagtggaaaaccttagcaaatggtgaatacccattaatgctccgcatctgtaaagacggaaagaagaaataccaaagtttaggcatatctgtcctaccccgttattgggactttacacgaaataagccaaaaccaaactgtcccaataaagagtatattcagaaaatcattcttgataaacaaacagagttacaacaacgaatgttagagttcaactctgaacagaaagaatatactaccactactctactcaatgacgaaaacaaaagatttgaactgaaaactgtctgtcaattctatcaagaacaaatcgaacaatgcaaagttttgtgtaaacaaaaaatacggaactcatttttgaatcccgtattttccatttacacaaaatattttatagctccatattttttataatagctaatcctccctatcttatctgttcaaatgaaatactttcattcttattagagctatctcacattagcgtagagaatgaaaattttatttctatttctgtatcttgacgcaacgtatcaaactggaattagcacgactattattcgaattcagtttgacatcatctttaccaagagttagatgtacagaattcgcggccttctctctatcagtagaactacaccaataataaccattagtatctgctgcagttaattttccattcttgcgactacgccatcctcctatcggataccaccagttttgtccgctatcatccatcataacatatcccttactccattctgcagatgcaaaaatacttgaagttttatcgtaaccatcgctggctcccatccatgtatcattaggagctaccatataaccttctggactcgggtcatatatagattttgtaagattggatgctttcggataagtatatccctctggattcccccataatgcccaatcagcatagtatagccaatcgtaagcacaataataaggtggattagctgtattgcttttactccgagaatacataatgaactttgttggattttgtatggcatatttcacattgcctgtactttctccacctttaactgtagcaaaagcaacttctcctacttcattgtacattttggcattactattttttccatactcccctgtacctacaaacggatctttccgcccccattgataaagtaatcctatagaggaacgttctccaggaataacggaagtcgctcctaaatttctgtcaagtacagtatagctatttccctttacgttcatacccaaatgctgttccttgacctctgtcacccaaatatgaaatgaccacaaaatcttagcatcttccgttttaggatcatccttgtcataaatagctatcactgcattccctggtcgtccgtcaagatttacagtaaatgatttacgatctgaagagagtgttactccctttacaaaatcagaagaaacatcattccacaattgtgcagcagacaacggtaaataattatctcctgcagagatattctcatatgcataaacagaactagtagtataataggcagcacaattcactgtaacagaaagctgtcccggtggtactatcacacaattagaagtaccataataataagtccacatttcccaatctatattatcaagcgttgcagtaagtactttacctgcttctatagattttcctgttaaatcaaggctatacgttcctcctcctttcggagccacaagcatcacatccaatttcccagtaaatgtttgcggaggtagaacaataatagcctcattattctcagttatatcaatatttccttttaaaacgacttcacgagacatattttccttagtgataatattaccactttccaaacccaattctatacatccagccattatatcatccgattctgatttcaaaacgacagatgatatagaagcaaattcctgattggcaggtattatcaattttaacgcacccaatgccggtttcaatttcaaatccgccaatccttcattatcagcaacagcataatacggacatgctgctacatcaactccgccagtacggtaaatctggtccttgggcatgttaaacttcattcgctcctcttgcagctgtacgcttaaaggatagtataccgtatatttttcctcggcaggcacttcatataaactaaccaacccttttgacaagacttgtacctctttaccattaataccgatttttccaccggaaggaatattcaaagcaaaagcttcatcaccttctacttttatatgaaaagaattaggttgttctataaagacttcctccattttttcttcggtacagccaactactactgccattactccggcaaatagcaggtatttcatcaataattttatcataaaaaaaaattatttatctaatctttcatcaagcgtaaatatataattctcaatattggtatatccgttttctgccatttgtgaagcatcgtccggattattcttatccaaaccatatccgtcttcaaactcatcaggcataccgtcaccatcagtatctaagaggctcactccagattctatttcacctacaccacctaaaggaaactgttgtgtatcttgttcattttggattatagtccctttttctcccaatgaagtcagttcgctgataagataagcatccacctgatcgcgcacaggcagacttgcaccaacatatttcacaatccattcatacgctttttcggcatccgattgctgagaaatagtaggaaatatttccggacacgtagcaagaaaagtcggattaccagaacaaagttcttcccaattgattgcaggaagtatttctaccccattcaaaacaccattcttatcttcatcataaaagtttccaacgcaataagtattaaaacgttcatttccaccgataaacggcttagttggtgacatatcaaccaattccacctttatgctgccatcttcctgacgtacattctgccagttaaccacaggacctttaataaaatagttattttcaattgaagtcaacgaactaccttcagaatcaccactcatgttatacgcagcgccacttccccaattatatacaacattattcacgaattggttcagccccttaactttcggattacgagtcttgttatcaatataaaggttacgaaacaatgtgattccattttcaagatcggtttgcatcaatccaccacaagaatgattctgtaatccctgtccaataatagaattctgtatagttatgttacgtgccgtagtactgtttatagaaaaattctcatcacgtccccacgttacagacaagtgatcaaatatcatattttctccatcagccactcccgcggcatccttgccatcagaacctttaattcccatacgaatacgcaaatgacgacatattaaattatctgcatccgtaaacgatacacgattaccatacaagacaataccatcaccgggagccgtctgtccggctatcgtcagattttttgagaaaatcaatgtcgacttcaggtttatgataccagccacatcaaatacaataatacggtcagacttactcaccgcatctcgaaaagaaccttcaccatcatcattaagattagtaacgcgatatatttctccaccacgtccacctgtagcatatcgcccaaaaccttctgcaccaggaaaggcaagcacctcaccataatcgggaaactttccggaatctcctttgacatatacttcttttgtgtttatttcttcagtgcatccagtacaagccaacaacatacttaaaagaaaagtcttcgtcattttcatactttcaataatattagaggttaataaaaagcgtggtctcaaactgcgttataaatgccacagtcacaaaaccacgctccagtctatgagaagtttgctatcaatagccaggcaattgagtcagatttggattatctatcaaaggatgtccactagattttgcagcaaacggacataattcagaaaagttctccttaaaaccataaaataatccatcagaaccatcccctttatcaatccaagcaggataagaacctccattttcctccgaaccggtaggctgttgataaataatcttgcctacttgtatcttacctctagcagatttggcaaatccgacaacagcttgtcctttcatattgaattcactgctgaaagcttcaaacattgccctaggataccatttatcctgcgaagttacattagaacgatgattcttcacaatttcaatcagttctgtttcataatcactatactgcttttcgtcttctggaatattttttactgtagctatctccgtaggatctgtcagttcaatataatctatggcaaggaacttatcaccgtacttttgaccgtcttcctgatatttatacaatctatatttcggcacattggcatatgcacccttacgatcggacaagtctttcatatcctgcttggcctgtctcaactccttagccaaacgtcccatacgaattaaatcgctacgaagagtaaattctccggcaaactcccatttacgttcctgcacaagcgcatcttcaaaaccttgctgatcggttggaataggcagttcacccactccggcacgggtacgtacttccttcaaggcagcttcagcctcgggagtaggaccgttattcaagtaattctccgtttcagcatacatcaaaagtacatctgaataacgtataagcggaatattgatatttctttggcttgcagcttgcggttccacacaccattggatacgacacttacccaatagtatagaagaataagtagtaccggtatcaatccatggtccttttttaccgccatctttggggtagatactatatgaagtacatgttacatcccgacgagtatcctttttatcaaatgaaagataataagttggcagaacaaactgtaatgtcttgcgtgaaccatatgttccattataagaacctggctgcagataaagtccaaattccgagttggtcttgtcaccatattctgccaattgccaaatcatttcagattctgtctccgtaagtttacgctggcaatgattataccacagatattggaaaccactcattccgtcttttccctgtaccaatgagttctttccatgttctttgatttgaaagcatgcatcattcgctatttcatataattccttaacacgtgtagcatcatcccgacgagccattttcaaagttgcaggatcatttgtctccaaatcccagcgcaatgaataacctcctgcataaagagcaatacgtgccagcaatgcatatgctccttgtttggtaagacgctcggtcgaagtataaccgctctcctcgtaccaaggtaaccattctgtagcctgttgcaagtccgaaacaatttggtcatatataccatcacgaggtgaacgtttcggataaaaacggttctcatcatttgcatccatttcttccaggggaacatatacagcaggtacatctccatagatacgtatcaagttgtggtaacagaatgcacgaatggccaatgcttcccctaacaattgatttcgcttcacagtttcgggcatcttcttcaaacggctgatagcgacatttgttgattcaataatacggtatccctctttaaagatagttgtaacagtggtaggaaccaatgggtcaaaatcataattacatgccttgtatttactactgaaaccatcctctgccgtatgcactaccgtttcacccataccaagattataaaacatctccttgtgtataagtcctctgtaacacccttgtacaaacaaatccgctttagtctcattctcaaatatataatcaacatcgtcagaggtataagactccatttccagccaatcagtgcatgatgtcatgctcatacccaacgaaaaactgagtattgccaccataaccagtttctttttcaaaccagcccatttaaatattttgctattcatattctttttctaattaaaacgttaaattaagaccaacaacataacttcttgaacggggatatgcggaactgtcatatcccggagtagtaaccacgttatccttagcagctctcacctcagggtcatagcctgaatatccggtaagtgtagccacattgttagctgtaaaataaatacgggcattggaaatcatcgctttcttcaaccacgttttcggcaaggtataccccaatgtaatctgagccaaccgcaagtaagaaccgtcttcaacaaaataagaagaaggatagaagccccattccttgttatttttagtcaatccccaaatacgtgcagaaccatcggggttcatttcctgcatacgtgacagcgttgcttgttttccggtagaaggatctactacacggtaatagttactgaattcctgtggaatattctcaaatatagaataagtagttaagctctgtttatttgcattatagatatcctggccaatggcaaatttcaagaaaacacttaaatcaaaacctttataagtaaacgtattattgaaaccgccgatacaatctggagttccattaccgattttcacatttttcttagtaaatataggattcccttcttcgtctacatcatcggctgcatacttaatatcacctggttgaggagttcccgacttaggcttcacaattccttcacgcaaagtcagtttaccatcttttccctcaatgaaatcctccgctgtataaataccttcatatttataaccgtacatttcacctaaagcttcgccgactgttgcatagtaggtaaccatacctgaacgggaatcacctgcactgaatgtcttttcagtctgtccttgctccaacgctactacttttgatttattaaaagacaaattcaaatcacttgtccaactgaaatttttagttcggatattcactgtattcagcgtgacttcccaacctctgttgcgcatcttacctacattttgatattgtgtagaataacctgtagaagatggaacaacacagttcaataacaagtcattcgcttgattattataccattctgctgtcaaatttactctgctattgaataaagacacatcaaggccaacattggtagctacttgtgtctcccatttcaattccgggttacccaactgcgtacctaatacataagcaggattagtcattacattattcatagggtaagaggtcaatgaaacattagtgcggtaagagaagcttcccacgccattgttacctgtagtaccataaccaacacgcaatttcaaactattgacaacatcattgatacgattctctttccagaaactttcctcagaaattctccatgcaactgaagctgaaggaaaaactccccactgatgtcctttggcaaatttagaagaaccatcggcacgaagagttgcagtcagcaaataacgttcatcaaatgtatagttagcacgtaagaaagcagaaacgattccactatgtccatgacttgatttcttttcttctacatttcccaatgaaatatcatcaattccatggttaggatagggcatctgcttcacgctgatagaattgctttcatcttcactataactcacttcgtgacccaataaaagatttaccttatgcttctttgcaaaagtctgattatagttcaaagtattcgttatctgataagaataagattcactatttcctatgcttcccgtcatacccgtattaactgggtccatcaggtaaccggtagagcgttcatcggaaaatgaagtggatttgctgctattccatctgtagcttccggcaatgcggtaagtaaagtgtttcagaaagtcaaactctaaaccggcatttacagaaaacatacgagaacgtttattggaagtagaagcttcgttctgtatcaaagggttagaagccgtataggaactctcagctccacgaaaatccacataggtctgctctgtcaacatttggtcacgggtaaagtaagtaccaccgctgataggttgacgtaacacatacttcataccagaataactgccgccgccatctacactcttgttattaaacattgcgttgacatctaggcgaattcctttataaagttctgaattgatttttgcacggaaagcacttttattggctgaatgattggcaagcagaccatcctgtccattataattataactcaacatcacctgagtcttttccgttccggtagagatatttacattatggctctgcgtcatggcatatccaccgaatacttcatcctgccagtcaatagaagatgcatcagcgtaacgctcatgtatacggtcatatacacccgtataaaaacctgtggcatctgtagccatgccatcatcataaaaagcactccatgtaggagtaatacctgtcaactcagcaaactcatactggtatttcacaaaatcttctacattagacattaaatctaattttttggctaacttatcgaaagaaaaataggtattgtaagaaacttgtgtcttacctttcttaccagatttagtagtaatcaaaataataccattggaaccgcgagcaccataaatagctgtcgaagaagcatctttcagtacgtcaatactttcaatgtcattaatatcaatattatcaagagcacttcccatctcaaatccatctacaatataaagaggttcagtactttgagtcaatgacataccaccacgaatggtaatgttggcacctgcacctggagcaccactctctgttacgatatttacaccggcagcttttccttgcaacgcctgcatcgcggttgttaccggtacattagctaattctttaccgcctaccgatgaaatagcacctgtcaaatctttacgcttcaccttggcataaccaatagctactacttcttccaacatcacggaagactctttcaacgtaaccttataatcagtaggtgtacccaatctgattacagcatcatcatatccgataaatttaatcaccaaatctctagcggaagaaggtactgagatcctgaacttgccatccatatcagttatcgtaccgatagaactgttgccctttactgtgacagaagcaccaatcaccacatcaacggcgtctcgaaccgtaccggtaattgttctattttgggcaaaaatgccgagagaacagcctgttaacaggaacatcaacagacaaagttttttgtgtagaattctcatagtttaacaatataatttttaattaataatataacaatccagctaaaatgtcataaaataaatataagattaacgatattcaagtactgtgttcgaatacaatatctgtattgcaaagatgatgcattcttaaaatcatttatatattacatttgatacaaagactttctcttttgatttttattatgatttagagtaatgcaaatagaatattgtacaaaaaacattagttctgccaaatgcaggctacctaacatttaagaagctaagttcaagcatttcaaaagaattattaccacaagcaaatttatttcatccgaactaatacaaatacccgataacttatatttcgagattgataaaatatctatctttgccgcaaatctaactgcaaactacaaatgaacatgcacattccttcccggcagaacatatttcgtgaaatgcgggattatttaatgattgctttaggcatgattatgtatggtatcgggtggacagtattcctgctccctaacgatattaccacaggcggagtaccaggtattgcctcactggtatattttgcaacaggactgccggtacaatatgtttatttcggcatcaacttcctactgttattgcttgctatccgtattttaggatggaagttcagcatcaagacaatttttgccgtttttaccctgacttcctttctgccaatcattcagcaactgacagacggcgttcacctactgaacgaccagcctttcatggcatgtgtcatcggagcatctttctgtggcggcggcatcggcattgctttctcttcgaacggaagtacgggcggaacggatattatcgcagctatcattaacaaatacagggacattacactgggacgggtcatgctgttttgtgaccttatcatcatctcttccagctacttcgtgctgaaagactgggaaaaagtagtatacggctatgtcactctatacatctgtagtttcgttctggatcaagtagtaaacagtgcacgccaatccgtgcagtttttcatcatcagcgaaaagtatgaggagatagccagacatatcaatgtgtatcctcaccgcggcgcgacagttataaatgcttccggattctataccggcaaggaaataaaaatgctgtttgtacttgccaaaaaacgggaatcaaccattatcttccggctgataaaagacatagacccgaatgcctttgtgtcacaaagtcaggtaatcggagtatacggagaaggattcgacaaaatcaaagtaaaataaaaatcaaacatgaagaattaagtatgaaaattaagtataagaaataaggaaatctacactgcccctctgatactctacattagcttagcttctataagccttattattttataccttatacttaattattgaacttcccttctttccacgtatagattataggatcgcggagaaacggttttagtttttccgctgcttctttttccatatagtcgggagtggtaaaagtaaaagtcagcgtagcgtccttgcccgaaaggtcggctttcattaaaagcatatcagcctgaaggcgagcattctgatagcggtacacgtctaccgtatcggaagcaggcagaataaaatcattcatattaggtaatgatgccaaataggatgcagcgggcaactcttcccaaccggtagtataaaacttgatatgactgtcacaagccggagcacaaactgtagaaacagtacagataagacgggtactgtcgttcactgacaaaagtttcatctgccaggtactttgaggtgttacctgcacacggatataatcgggagtaagctcagtcatttccgacttaccgccaaaacgattggttacttccgctttcatcttgctctccaagaagtcaataaagtcggcacgatttacagccgtaagcaacggactcagagaatcgggcatattggtaaagcaagtttttgccagttgcgccgacaaagaaccaattcccatacctactacaaataaaaagactatcaacttcttcaccatatccctataatattttatcaatactaaaatcttattattataaaaatcaccttacagataagaacataactcctgcaaaaaacgcgcatccacctcatcaaaactattcaagttttcactgtccacatccagcacaccccatacttctccctttgcacgaagaagcggaagcactatttccgaacgcgacaaagaactgcatgctatatgacccggaaaagcatctacatccggtacaaccaatatttcagccctcttccaggcctttccgcaaacgccacgccccttctttattctggtacaagccaccggaccctgaaaaggggcaagcaccagatcctcacctttcaccagataaaatcccacccagaaaaagtgaaaagtctctttcagtgcagccgcaacattagccagattggcgataaggtcatcctctccttcaatcagacacttaatttgcggaagcaacatacgatacttctcttctttgccgccattactgatacacaaatcttctgccatacgcgctattgaaattctatttgctccccaaatataggaagaacattccaatcagcaccaaaatgaggtctaccgccttgctttttaaattcttttcacggaagaaaagggcgccaaacaggaaagaaacaaccacactgccacgtcgtaccatagatacgatagaaatcatggaatcctcataactcaaggcatagaaatacacaaagtctgctgcacaaagaaagacggatataccgatgatagtccaatcccaacggaacggtgtactttcctttctcttgggataccacagcaacaggataatgggacacatgataaacacctgatagatgttgtaccatgactgcaccaccataggcggcagctgcttcatcagatacttgtcgtataatccgctgacagcacccgtcacggccgccagtacaataaagagaatccatttattgtgcttgaagtcgataccctctttcttaccggaacggcttaacataaagaacgacaggactgccaacatcacacctatccattgatacagattgagccgctcgccgaatacaagcatggctcccacaagtaccattaccggacgcgttgcattaatcgggcctacaatggtaagcggcaagtgcttcattccgaaatatccgaatatccacgaggaaagaacgatgaaagatttgatgatgataaatttatgcacaccccatcccactacaggaacatcaaacatcgtacctcccaacacagcaggagcaaaacacgataccagaataaacggaagaaatattaaactggaaaataccgtattcaaaaacaagaccggaagcacggcattgtctttgagcgcctgcttcttgaaagcatcataaaatcccagcaaggctgccgagagaaaggctaataataaccacattgattttagctatgaattatgagttataagttatgaattagttatattacaagaagagaaagagtaaaagtaatcacttatcactaactactaatcactaaccactaaccgctaataaaagtttcttcaggataggcaacatctacaaggaacaaagcgttaccgggaacggaagttcctgcacggcaccggtctttttgttcgataacccggcgaaagcccccgatggtaagtttacccctgccgacttcgagcaatgtacccactacagcacgtaccatgttccgcagaaaacggtcggcctgaatggtaaatacccaggtcacttcatctacctgcgtccaggcagcgtgcattatcttgcaattattggttttgacatcggtatgcaacttgctgaaactggtaaaatccgtatattcaaacaaagtccgggcagcttcgttcatccgttcaaagtccggagtctggaacagacggcaacgatactgacgattgaaaggcatcttggccgtagtaacatagtatttgtatgtacgtgccgtggcatcaaagcgcgcatgagcatcgggacgtacggcacgcagacggtaaacggaaatatccgggggaagcaggcggttcagcttatccgtcatgaatatcacatccaacggagtttcactgtcaaaatgtgccaccattagggaagcatgtacaccggcatcggtgcgtccggcacccaccacctccacttcacgccgcaacaagatagagagtgctttcatcaaacactcctgcacacttgcaccgttgggctgaatctgccagccatgataagctgtgccgtcgtaggccaaatagataaaatatcgctgcacgtttctttttattcctgaatttggctgcaaaggtacaaaaagaggggaaaaaagcagcaaactcttccaattgttctataggattacactatctttgcaggagttttcaccacaaattacacaattctacaaagttcagaattaattatgtataataaaagccgtttcatttccctgtttttattggcaggcatggcaataacttgctgcctggctggatgtaagaaaaaagacatgtccctcaagctgaatgagccgcacaacatacggggtgttatcagttacaaacgttctttcggcgatttgaatgaaaagcatttgaatgtggcgcaagctatcggcatccgtccattagcatcgcgcgaggaagcggaaaagatgaaagaaaagttgcagtatatcgctacaaatgatttatacgcggttgattctttgacgcattccgtcccgtatctcattccgggagcggctgccctgctcgatacaatcggttataactttctcgattccctggctgccaaaggcttgaatccgaacaagattacagtaacttccgtactgcgtacaaaagacgatgtcaagcgtctgcgccgtcgcaacggcaatgcatccgaaaattccgctcattgctacggcacgacattcgatgtcagttggaaacgcttccagaaagtagaggatgaagacggacgtccgttacaggatgtcagttcggatacattgaagttggtgctgtccgaggtattgcgcgacttgaagaaagcagaaaagtgctacattaaatatgaactgaagcaaggttgtttccatattactacaagaatgtaaaaaacgaatctattagtttttaaaacatcagaatattgaaataccaacattaacatgcagtttacaatttctcctccagcatccgccatgccaacggtaagcaagtaacaatatcccctgccgtcatacccattgctccatgcttcttgcaagcaatatctcccgccagtccatggacataagcggccatacgtgcagcagtttccgcatcgtatccttgcgccagcaaggccaatacgacacccgtaagcacatcaccgctaccccctgtcgccatgccgggatttccggtaggattaaaccagcactttcccgacggtgcaataataacggaataagcacctttcaatataatgtatactccggcgctttttgccagttcacgggcttttgtcaaacgttcgtacgagttctgacatttcccaaccaaccgttccaattctttgggatgcggagtgagaatactgcctttgggcaaacggccgatgtaactgcgatgttcacccaacaggttcaacgcatcggcatccactatcatgggcgtctggcaagaatctatctgatccagtaaagcagcttcggtatcttccgccctgcctaatcccggaccgatacccaccgcctgatagtcgtcagtatcagtggcacaagaaaaacggacatcgtttatatctatttccgtcatggcctccggtacggcagtctgcacgataaagttattgcaaaaaggaatatgaaccgtaagcaatcccactccggagcgcaggcaagcacgtgccgcaagcaccgacgctcccgccattccttgcgaacctgctatcaacaaggcgcgtccgaagcttcctttatgtgcaaacctgccgcgtggcttcagcaccgatgccatatcctcgtgttccgtcaacgcaaaatccgtttccttttctgtaatggcttcctcactcaaaccgatatccagcaactgccactcacccacaaacggctcgttctcggcaaagagaaaagccagcttcggcagttgcaagcttagcgtcaggtctgcacggatgatattagcctgaatattataggtattgtcctctcccattaaaccggaaggcacatcaatggcaactaccgtagccggcgaggagttgatgtacttcactaccgcagcgaaaccaccgctcaaaggtttgttcagtccgctgccgaacagtccgtctacaaccacatgctccgctgtcagcactggcggcacgaattgcgtggttatctcatgaaaatcaattccggaaacccttgccaaacgttccttgttcgtttcgcaatccggagacaaagtacctttcgtattaaagagatatacctccacccgatatccctgctctgccagcagacgcgaaacagccagcgcgtctcccccattgttgccggggccggcaaataccgtaaaaggggtttccgctccccagcgctcggatatggcttttgccagagcctgcgaagcgcgctccataaggtctatggaagcaatcggctcattctctatcgtataggcatccagttcttttatctgaatggtaggaaatatttttatcattgcagtttattcgtttaagttacgagcaaaggtacaaaaaataataactacttttgcggctcaaaacatataaagacaattaacacataaccaatgagcacatccaaacaccctaaaggactttacctgattttcgccaccagtaccgcagaacgtttcagctactatggcatgcgggctattttcattctgttcctgacacaggccttgctgttcgacaaagaacacgccgcctccatctacggcagctacaccggactggtctacctcaccccgcttatcggcggatatattgccgacaaatactggggcatccgccgttctgtcttctggggagccatcatgatggcattgggacagtttctgatgttcttcagcgcttccatgctggacgctgtccaactatcgcactggctgatgtatggcggactcaccttccttatattgggaaacggatatttcaaacctacggtatcttccctcgtgggacaattgtacgaaccgggcgacagacggttggactccgcctataccatattctatatgggcgtcaacgtaggctctttccttgccccgctggtatgcggctattttggcgaaaccggtaatccgaacgacttcaaatggggctttctgattgctgcaattgtcaccgtctttacggtcatattgttcgagacacagaagaataaataccttatcggtcccgacggcaagcagctcggcatcattcccgatgctaaaaaggaacaaccgcaagctacaaagacagccgcccaatccactacgcacaacagcaagaaaaaacgtaattatctcttattgggagtattgacaatagcgcttgccgttttcttctactggtgtttcggcaacgactggatcagcatcggcatcttcaccgcctgtatcgtctttcctgtcagcatcctgttggaaggctcgcttacgaagattgaacgcgaccgcatctttgtcatctatatcatcgccttcttcgtaatcttcttctgggcagcctacgaacaggcaggcgcttcactgacgcttttcgcttccgaacagaccgaccgcgttatcttcggctgggaaatgccggcttcctggatacagtcattcaatccattcttcgtagtgatactggcagccatcatgccgggagtatggggcttcctcaataaacggggcatggaacccgcctctcccaccaaacaggccatcggcttgctgcttctatccttgggttatctcgttatctgcttcgctgtaaaggatgtgcaacccggcgtcaaggtaagcctcatctggctcacaggactttatttcatccacaccatgggcgaaattgccctttcgcctatcggattgtccatggtgaacaagctcactcctatccgctttgcttcgctgatgatgggtatatggtatctctccacggccacagccaacaagtttgcgggtacgctgagcgggctctatcccgaagccggaaaagtaaagacactgcttggctaccgcatagaaacgatgtacgacttcttcatggtatttgtcgtaatgtccgccaccgcatcgcttatccttttcctactctcaaagaaattgcagaagatgatgcacggagtggaataaaatcactatttttgcgccaactttctaaaaactcccatttatggataccatacaaataaaagacaaaatgttcaccgtttccattaaggaacaggacatattgaaagaagtaacccgtgtagcgaacgaaatcaaccgcgatttggcgggtaagaatccgcttttcctaagtgtgttgaacggctcgttcatgtttacttccgacctgatgaagcgcatcaccattccttgtgagatttctttcgttaaacttgcctcttatcagggagtatcttctacgggagtaatcaaagaagtgatcggcatcaacgaagacatctccggacgcaccattgtcattgtcgaagatatcgtagataccggcctcaccatgcaacgcctgctggaaaccctcggcacacgcggtcccaaggaaattcacatcgcctcgttactggtgaaacccgacaagttgaaagtagacttgaacatcgaatacgtagccatgaacattcccaacgacttcatcgtgggctatggtctggactatgacggattcggacgcaactatcccgacatctataccgtagtagactgaaaccgggaaaaggcagcaaggcaaaggtattaatttgtaaatcaaaaataatagctaaacaaatgttgaacattgtaattttcggtgctcccggttcaggtaagggaacacaaagcgagagaattgtagagaagtacggtatcaaccacatttccaccggagacgtgctccgcgcagaaatcaagaacggcactgagctgggcaagacagccaaaggctacatcgaccagggacaactgttgccggacgaactgattatcgacatcctggcaagcacactggacagcttcaaggatagcaaaggcgttattttcgatggtttcccccgtactatcgcacaggcagaagcattgaagaagatgcttgccgaacgcggacaaagcgtaaacgttatgctggatcttgacgttcccgaagacgaactgatgaaacgcctcatcaagcgcggacaggaatcaggccgtgccgacgacaacgaagagactatcaagaaacgtcttaccgtatatcattcacagacagctccgcttatcgattggtataagaacgaaaagctgtacgcacacattaaaggtataggcgaactggatactattacggcagatgtttgcaaagcaattgacgctgcgaaataatatttgatatctaaagcagatatttttaacgcaaattacgcgaaccactacggatgactactcgtccgtgcggttcgcgtaatttatattatttcctacatcggctctcagccgttccaccattttacacagattcgcctcgttctgttcatccgaaacagtggggtcttttacaaaatacccgcaaggcaagtccggacaatcaccgcaattctttttcctcttggtgcggcaacagtcataaatgcggcagacatcatcacccgtataccgcaaccagaatacttttccttttattttcctgcatccgccgcattccagcggaaaagaagcacactccacgcaaaccgcaccgcagggagaaggctcaacaaaatcatctttccagaaccaccacttgcacttcatcgggtcgggattcccggtgtttacaaagtattccacggcacgataaagatacaactggcagcggtcaagagtgcaaccgcgcaaccggcactcctcggcataaagttcttcggcactcttgccacgcaatgaggcgatagtggtataccccatcagtatcaggtcctgctccgtgcaggcacctatattgggaatcgttctcagttcactcattaagattattgtattaggatgtaaatcaatgaacaaaaataacgttatcaatccatccaacctaacaaatcacaacccaaatttgagcatatcgcttgaaatcactaattttgcgcctgttatcccgacggtaacaataaagcaacctaaaaagtaaaaagaatatggctgaatcgaattttgttgactacgtaaaaatctattgccgctccggtaagggcggtcgaggctccacgcacatgagacgtgaaaaatacattcctaatggcggccccgacggaggtgacggaggacgaggcggccacgtgattctccgcggcaaccgcaactactggaccctgctgcacctgcgctacgaccgccacatcatggcaggccacggcgagtcgggctccaagaaccgcagtttcggcaaggacggagaggataaaataatcgaagtgccctgcggcacggtagtgtacaatgccgaaaccggtgaatacatatgcgatgtaaccgagcacggtcaggaagtcattctgctgaaaggcggacgcggcggactgggtaactggcacttcaaaaccgccacccgtcaggctccccgcttcgcacagccgggcgaaccgatgcaggaaatgacggttatcatggagctgaaactgctggcggacgtcggtctggtaggcttccccaatgcaggaaagtcgacactgctctcggctgtgtcttcggcaaaaccgaaaatcgccaactatcccttcactacattggagcccaatctgggtatcgtgtcctatcgcgacggaaagtcattcgttatggcggacattcccggcatcatcgaaggggcaagtgcgggcaaaggtttgggactccgtttcctgcgccacatcgaacgcaactcactgttgctgttcatggttcctgccgacagcgacgacatccgtaaggaatatgaaattctgctgaacgaattgcgtactttcaatcccgaaatgctggacaaacagcgtgtgcttgccatcacgaaatgcgatatgctggatcaggagctgatggacgagatagagcctacactgcccgaaagcattccgcacgtattcatttcggccatttccggtctgggcatctccacactgaaagatatgctatgggaagagctgaacaaggaaagcaacaagatagaaggcaagattgaaagcattgcccaccgcgccaaagacatgagccacctgaaagaagaactgaaagacgaaggcgaggacgaagacctcagctacgaatacgttgacgacgaggacatcgaggaccttgaagactttgaatacgaggaagaggattgggaggatgacagaaaatgattcccctcacaaaagataaaagaatgttgggatatgaggtacttgccccatatcccgacatttcttgttttgtaaccacccggcatggcggatgcagcaccggcagctatgcttctttcaactgcactccttataccggagacgatgcggattgcgtacgcaaaaaccgggaactgttatgcgccgccctgcctgtgcgcccccaagaacttatcatcccctttcagacccacggcaccgattccctcatcatcgacgatacctatctgaacgcaacgcatagcgaacggcaagccatgctgcaaggcatcgatgcactcattacccgcatgcccggctgctgcatctgcatctccactgccgattgcattcccgtattattatatgacaggcaacgccgcattgttgccgcagtccatgcaggctggcggggaacggtaaaccgcattcttgccaaaacccttcaccggatgcagtctgcctacggaacaaggggaacggatgttattgcctgcatagggccgggcatctccctcgactcgttcgaggtgggcgatgaggtatatgaagcgtttcgcaccgaaaatttcccgatggaatacatatccgtatggaagcccgaaacgcacaaataccatatagatttgtgggcagccaaccgtttgcaactctccgacttcggagtgccgccccggcagatagagaatgcaggcatctgtacctaccggcagcatgaggacttcttctcggcacggcgtctgggcatcaagtcgggacgtatcctgtcgggaattatgttgaacggacaggaaaaggaagaaagaaagtaacgcctatatttgaaagagttacagtttatggctacttttgtaccgtgccgataagttgaagcaactctaattctcgactcacattatacgaacaaaccaatacctccaatgatatgaaacaaaaccgggaagacattcctttcgaatatgcccattgttttgccacagacgggcagtgtccgcaacgttcgggatgcctgcatgccctgataacggagcttccgatgaaaacatcgcaatacgcaagcaatatcataaccgccatagacccgcgctacattgcttcgctgcatggcaagggcgactgtaccttctaccgtagctccgacctcaagcgttatgcctgcggaatgtcccggatgttcgatgccgtgcccagcagaatcgtaagcgaagtcagaagatgtgtacagaactgcttcacctgccgcagctattactttgccagccgcaaaggcaagagacttatctcacccgcagaacaggcggagattgcatccgttttccgtgccctttgcccggagctacgtcccatatacgacagctttgaggaaagatacgaatggtgaccggagaagtacaggcgggtgatactgcaaacctgcctgtgccagatctatcccacacttagtttatttttatttatccacaataaacttcgagtttaatcctattaaactccgggttcattaggattaaacctgaagtttaacgccgttaaattccaagtttatccacgacgaaccgacagtaaaccatacacaatgaaaagcctcatgtaccacatcaccttatccgaagagattaagcgcctctgccccgcctttcagggcgttgccgtcatggcgcaagtaaccaactccgcacacaacgcagagctgtggcgggaaatcgacgctttcacccgcgaactgagagccgatgaaaccgcggaaagcatcaaacagcaacccgccatcgccgccacccgcgaagcctacaagcgttgcggcaaagaccctagccgttaccgtccttccgccgaagcattgcgccgccgtcttatgcgggggctcgaactgtaccaaatcgacacgctggtagacctcatcaacctcgtatcgctccgcaccggatattccatcggcggcttcgatgcggacaagatacagggagacagccttgaactcggcatcggacgtgcggaagagcccttcgaaggcatcgggcgcggaacgctgaacattgaggggcttcccgtctaccgcgaccaggcaggcggcataggcactcccaccagcgacaacgaacgtaccaaaatgggactcgaaacccggcgtatccttgccatagtcaacggatacaacggacgcgaagggctggcggaagccgccggaatgatacaggaactcctgcggaaatacgcagactccgatggcggaacaatactctattttgaataaacaatgacaacaaagtgatgccgccatgcaagccggtgcaaaaaaataacacgcagaaccgtccaagtattcaaacgtttcactacatttgcaaaacgttttacctgaaaaaaagaattgaactttaaaacatatcgatgatagaaaaactgattgttcttgaggatatcgacccggttatcttttacggcgtaaacaacgccaatatgcaactgataaaagctttgtatcccaaactccgcatcgttgcccgcggcaatgtcatcaaagtgctgggagatgaagaggagatgtgcgcgtttgaagaaaacatcaccaaactcgaaaaatattgtgccgaatataattctctgaaagaggaagtcatcatcgatatcgtcaaagggaacgccccgcaagctgagaagtcgggcaatgtcatcgtgttcagcgtaacgggaaagcccattattccgcgcagcgaaaaccagttgaaactggtagaggcatttagcaggaacgacatggtatttgccataggccctgccgggtcgggcaagacctatacggccatcgcccttgccgtacgcgcgttgaagaacaaggagataaagaaaataatcctcagccgtcccgccgtagaggccggagagaaactcggtttcctgcccggcgacatgaaggacaagatagacccgtacctgcaaccgctttacgacgccttgcaggacatggttcccgccgccaaactgaaagagtacatggagctgaacatcattcagattgctcccctcgctttcatgcgcggacgcacgctgaacgatgccgtagtgattctggatgaagcgcagaacaccaccacccaacagataaagatgttcctcacccgtatgggcatgaataccaaaatgattgtaacgggggatatgacgcaaatcgaccttccccagtcacagacttccggactggtgcaagcgctccgcatcctgaagggcgtgaaaggaatcagcttcatcgagctgaacaaaaaagatattgtacgccacaaactggttactcagattgtggaagcctacgaaaagtttgacaaagaagcgaaagccgaacgggagaaacggaaagcagaacaagccgccggacagcaactcccggcttagacagtaaatatccaactcataaatatcactaaaatgaatgcattaacagcaacagatttcaactttcccggacagcaaagtgtctatcatggaaaagtgcgcgatgtgtacaacatcaatggcgaaaagttagttatggtcgctaccgaccgcatttcagccttcgacgtagtattgccgaaaggtattcctttcaaaggacagatgctgaaccagattgcagccaagttcctcgatgccaccaccgacatctgccccaactggaaaacagccacccccgaccctatggtaaccgtgggcgtaatgtgcgaaggcttcccggttgagatgattgtacgcggctatctctgcggcagtgcatggcgcgcctacaagagcggtgtccgcgaaatctgcggcgtaaagctgcccgaaggcatgaaggagaaccagaaattccccgaacccatcatcaccccgaccacaaaagccgaaatcggcgagcatgacgccgacatctccaaagaggagattcttgccaaaggcctggccactcccgaagagtatgcaattctggagaaatatacaatggcgctcttcaaacgcggtacggaaatcgctgcagaacgcggcctgattctcgtcgacaccaagtacgaattcggcaagcacaacggcactatctacctgatggacgaaatccacacaccggactccagccgctatttctactccgaaggctacgaagaacgctttgccaaaggcgaaccgcaaaagcagctttcaaaggaattcgtgcgcgaatggctaatggacaacggtttccagggcaaagagggacagcaggttccggaaatgaccgacgaaatcgtgacttccatcagcgaacgttacatcgagctgtacgagcacatcaccggcgagaagttcgttaaagaggacacaagcaacatcgccgaacgtattgaaaagaacgtaacggagtacttaaagtaacgattgacggatggactacccccaagaacacatcaagccttacggcaacgacggcaagaagagcgaacaggttgaagagatgttcgacaacatcgcccccgcttacgacaagctgaaccataccctgtcgatgggcatagaccgcagctggcgcaagaaggcgattgacacgctccgccctttcagcccccggcgcatcatggacgtagcgaccggaaccggagactttgccatacttgcctgccgcgaattgcagcccgatatgctcatcggaaccgacatatccgaaggcatgatgaacgtgggacgtgaaaaagtaaaacaggcgcacctctcggacaggatttcctttgcccgggaggactgcacctctctctcgtttgccgatgaaagcttcgatgccgtgaccgtggcgttcggcatccgtaactttgacggactggataaaggattgtccgaaatgtgccgcgtactcgtacccggcggacatctcgtcattctggaactctccacgccggaccgcttcccgatgaaacaactctttaccgtctactccaaagccgtcatcccgctgctcggcaagttcatttcgaaagacaacagcgcctacacctatctgccccaaagtatccgcgcctttccgcaaggcgaaatcatgcagggagtaatccgcaaggcagggttcagcgaggtacgcttcaagcgattgactttcggaatatgcaccttatacattgctaagaaatagtcacttatattccccctttaacacattttggatatgcagaaatacggtttaatcggttacccgctgaaacattcgttctccatcggctacttcaacgagaaatttaaagcagagaacattgacgccgaatatgtgaacttcgagattccccgcatcgaagacttcatggaagtgattgaagaaaaccccaatctctgtggactcaatgtaaccattccctataaagaacaggttataccctacctcgacgaactggataaggacaccgccaagattggtgcggtcaacgttatcaagattgtccgccttcccaaaggcaaaatcaagctgataggctgcaactcggacatcatcggatttacgcaatccatcgaacccctgctgcaaccccagcacaagaaagcgcttatcctgggcacaggcggtgcatccaaagccgtatatcgcggcctggagaatttaggaatagaaagcacttttgtgtcacgtaccaaaaaggacgacaagttcctgacctacggggagctgactcccgaaatcatggccggacatacggtcatcgtaaactgtacgcccgtgggcatgttccccaaagtggatttctgcccggacataccctacgaactgcttactcccaaccatttgctctacgatttgttgtataatccaaatgaaacactcttcatgaagaaaggcaaagcgcagggagccgtcaccaagaacggacttgaaatgttgctgctgcaagcctttgccgcatgggaaatttggaacaagtaacatgaaaaaaatactgaaatattcattcataggtctcgctgcgctttgtaccgccctgttgtgcggcggatactatatgctggggcatgcgctgaacccggatgaactgattacacgctcccgcaacagccaggcttcctacgaatacatgttcgggcaatatcccgagctgaagccgtgggtggacagcctgcagacggcaggggcgctgcgcgacttctatataaagaacgaccggggcgaaaccctgcatgcgctgtatgtagccgccgccgaacccacccgtaaaacagccgtcattgtgcacggctataccgacaactccatccgcatgctcaacatcggctacctgtacaaccggcaactgaagtacaacatccttctgcccgacctgcacggtcatggcgcaagcgagggtgccgagatacaaatgggctggctcgaccgtctcgacgtactgcaatggaccgcaaccgccgacgagcttttcggcaggaacaatgaaacggtgaccgcaggcgacagcacccgtatgcgcagcagcggtacggaaatggtagtacacggcatctcgatgggagctgccaccaccatgatggtgtccggcgaagtggaacatggaatacaccagcaaccgttcatcaaatgtttcgtcgaggactgcggctataccagcgtatgggatgaattccggggcgaactgaaagcacaatacggcttgcccgctttcccgctgctgcatgtggcaagccgactttgcgagcaagagtacggatgggatttccgtgaagcttcggctttggagcaggtcagaaagtgtaccttgcccatgctctttatacacggcgatgcggactcctatgtgcctacatggatggtctaccctctttacgaagccaagccggaaccgaaagagctgtggattgttccgggttccgcacatgccatgtcctacaaggactatccgcaggaatatacggagcatgtaaagaaattcgtagggaaatacatacgttgacgtgatttttcctaccttagcccctacaaatacaataagtatgaaacgatttatctccatagcattcctcttgtgcatgcttatttccctgcaggcacaagagatttacaccaccggaaacattcctaaagtacatcttcaggacaagacacgctacgtttgcaaccccgccggtatcctttccacttcggcatgcgacgaaatagaccgtatgctctatgccctggaacagcaaaccggcattgaaaccgtagtggcggttgtcccgtccatcggcagtgaagactgttttgacttctcgcaccggttgctcaacgaatggggcgttggcaagaaaggaaagaataacggactggttatcctgctggtaaccgaccagcgctgtattcagttctataccggatacggactggaaggagacctgcccgatgccatttgcaaacgcattcaaacgagggacatgattccttacctgaaagacggtaactgggatgccggtatggtggccggcgttcgtgccgtatgcgcccgtcttgacggaagtatggcaaacgacccggacgaaagtgacggcggctctccgataggattgattctggccgttgcggggttctttgccatcgccatcgcggcaggaatactgaaaacacgcgctgcaagcaaatgcccgcaatgcggccagcataagctgcaacggagcaacagcgtgcttatctcacgccgcaacggagtacggacggaagatgtcacctatacctgccgcaattgcggacataaggtagtacgccgccagcagtcttacgatgagaactatcggggcggaggtggcggcggtcccgtcattttcggaggcggcggcttcggcagcagtggcggaggattcagcggcggcagcttcggaggcggcatgggcggtggcggcggagccggttcacggttctgagcggaacagccgggcgtctcctgtaacaaaccaattcagattgcatcattaataacaaaaaaagaagtatgaaaaaatcaaccattatcatcattgttgtcgtagcccttctcgccatttggggagtcagcggttataacggacttgttaccatggacgaaaacgtcagcgggcaatggtctaacgtagaaacacaatatcaacgtcgtgccgacctgataccgaatctcgtaaacacagtcaaaggatatgcctctcacgaaaaggaaacgctggaaggtgtggtagaagcccgtagcaaggccacccagatgaccgtagacgccaacgacctgacaccggaaaagctggccgaataccaaaaggcacagggcgcggttacttctgctctcggcaagctgctcgccattaccgaaaactatcccgacctgaaagccaaccagaacttcctggagctccaagcccagttggaaggtacggaaaaccgcatcaacgtggcacgtaccaacttcaacaatgcggcgaagaattttaatacggcaatccgccgcttcccaaaaaacattcttgccggtcttttcggctttgagaagcgtgcctactttgaagccgccgaaggaagcgaacaagcacctaaggtggagttctaaagagacggaattgaatatcaaacatcccctcatccggtgtcgcacccgcacagacttgcaagtacgatgccggatgaggggatattttttacgcaaagctaaggctataagcgaaataatcactacttttgtgctcaattgaacaaacttattatcccatgagtaatcaacgatatatgatgaggggcgtcagcgcatccaaagaagatgtgcacaacgccattaagaacatcgacaaaggtatattcccgcaggctttctgcaaaatcatccccgatatcctgggcggtgaccctgagtattgtaatatcatgcacgcagacggcgcaggaacaaaatccagtctggcctacatgtactggaaagagacaggcgacctctccgtctggaaaggcatcgcacaggatgcgctgattatgaacatcgacgacctgctctgtgtaggtgctgtggacaatatcctggtatcgagcaccatcggacgcaacaagttgcttgtgcccggagaagtgatttccgccatcatcaacggtacggacgaactgcttgccgaactccgcgaaatgggcgtaggcgtatatgccaccggtggcgagaccgccgatgtgggcgacctggtgcgtaccatcatcgttgactctacggtaacctgccgcatgaagcgttcggatgttatcgacaatgccaatatccgtccgggagacgtgattgtaggtctctcctcttgcggacaagccacttacgagaaagagtataacggcggtatgggtagcaacggacttaccagcgcccgccacgacgtattcgccaaatatctggcggagaaatatccggaaagctatgacaaagccgtacccgacgaattggtatacagcggaaagctgaaactgacagacagcgtggaaggcagtccgctggatgccggaaagctggtgctctctcccacccgtacatatgcgccggtggttaagaaactgctcgatgcgctccgtcccgaaattcacggtatggtacactgctccggcggtgcgcagaccaaagtgctgcactttgtcggagataactgccgcgttgtcaaagacaaccttttccccgttccgccgttgtttaagaccatcaaggagcaaagcgatacggactggagcgaaatgtacaaggtattcaatatgggacaccgtctggaagtatatctttctcccgagcatgcggaagaagtgattgccatcagcaaaagcttcaacatcgatgcacagattgtaggacgtgtcgaagagagcgataagaaagaactgattatcaagagtgaattcggagagttcagatattaatgccgacttgtcatctcataacattaccactttaattaaatggcagataacaacaccatattagagaaactggaaggcctcgttgcccgcttcgaagaagtgtccacactgattaccgacccggcggtgattgccgaccagaagcgctacgtcaaactcaccaaagagtacaaagaactgggcgacctgatgaatgcccgcaaagagtacatgcaggtactgaacggcatcgaggaagccaaagaaatcatcgccaacgaaaccgacgccgagatgcgtgaaatggcacgcgaagaacttgatgcctgccaggcacgccagcctgaactggaagaagagataaagctcctgcttgtccccgccgacccgcaggacagccgcaacgccattctcgaaatccgcggtggtgcaggtggagacgaagccgccatttttgcaggcgatctcttccgcatgtacaccaagtattgtgaggctaaaggctggagactggatatatccagcgccaacgagggcgcagccggcggtttcaaggaaatcatctgctccgtaacgggagacaacgtatatggcacgctgaaatatgaatcgggcgtacatcgcgtacaacgcgtgcctgccaccgaaacgcagggacgtgtacacacatccgccgcatccgtggcggtactgcccgaagccgaagagttcgatgtagtcatcaacgagggagaaatcaaatgggataccttccgaagcggcggtgcgggcggtcagaacgtaaataaggtggaatccggcgtacgcctgcgctataactggaagaacccgaatacgggtgtcgtagaggaaattctcatcgaatgtaccgaaacgcgcgaccagccgaagaacaaagaacgcgccctgtcgcgcctgcgtacctttatatatgacaaggagcaccagaaatacattgacgacatcgcttccaagcgcaagacaatggtctctaccggtgaccgttcggcaaagatacgtacctacaactatccgcagggacgtattaccgaccaccgcatcaactataccatttataaccttgccgcctttatggacggtgatattcaggattgcatcgaccatctgattgttgcggaaaatgcagagcgactgaaagaaagcgaattgtagttatgaaagggctatcagtagagaaagcgtttcacacggttaccgaagcgtttcagaactgcctgaagcgcttcccggttacggtagcctttatctttgcattcactgcctatctcattcatctgacatcaataagctggacaggcgaagaacggttgctgtttataaccggctactacctgtcggtaggcatcctgctttcgctcacgcttcatctgtggagcgaagaagtaaaaagccggatgtggaagacaggcatacaacttgccgcacacgccctgctcatagccgatgctttcctgctctaccgttatctcggtacagagagttcatggattgaaatcggcatcgcccacacggcagccattctcaccatagggctttccacattcttcctctcgttcctgcgcgagaagaatgacattgccagttggaattttgcactgaacgccgtttcttcgttcgctgtcacacaaatcataggcctcatcctatgggcaggcatcagtctgctgttgttctcactgcaccagctgttcgacatccatttcagcggaaagtgctatgcctatatctattatctgtgcagcataacgctcgctttgatactgtttctcggattgttgccgcagggagaggacaaacacaaccgcgaaccccactcatccgaattcctgaacggcatcatacactacctgttccttccgcttacagccggatatctgacagtgctttacatgtatgccgcccgcattcttgtcagttgggaattgcccacaggctgggtgtcatggctcatcgtagcattaatgacggtgtgcatcgccattcaattcggtctgtatcccgcacgccttgaaaataacaaacggtttgacaactggattgcccgctggatgcccgtactgatactgcctctgctgttgctgatgaccataggcatcgtgcgacggttcaacgattacggcattaccgttaaccggctctatctcgccacactcaacggctggttctattttgtctgtatcgggttgttcgccatcaaggcacggcgtatcaactggatacccatttcgtttgccatcatctttttgctgacgtcggcattgcccgtcaactatgccggcattacaaagaatgtcattcttaacgaaatcaaagccgagatgcaacgcagttgccgggcaaaagcccccctctcgctacaacaatatgaggaatggatgtactcgctgccggaaaagcaggcgatacggataaacagtaaattcagatacctgaacagctggttcggcacggagagcgtcactcatctgatagacagaaacgtaacctacaacctctattccgtggcagcggatattgaaacaaatgcagcgcccgccggcactgatagcggcaaggttacctatagcggagcaatcgacagtcaaacgaacatcagtgttcccaaaggctacacgcgatttatcaccatacccagcgacggtatatcaagccgctttcttaccatcccccgccaatatcttgaaaatggaatattgcccgtttcactcgatacccggacggacaatctgaacgatagcgcatatatcgaactcagcacattggaaatgttggaaaaaaacagcaagcacggtcatataccgcctacctctttccgatgcaattctcccaagaacctgttcatgctgactgcattcgatatccattatgaaaagaacagtgacgaagatgtaagaatgagcatcaagggatatttatttaaaaagtaaaaccattaaaccaacaaattgcgatatgaacaaacaacaactctttgagaatatcaaacgcaagaaatcatttctatgcgtaggtctggacacggatatcaaaaagattccggaacacctgctgaaagaagaagaccccatctttgccttcaacaaagcgattatcgatgcaacagccgacctgtgtatcgcctacaaaccgaatctcgctttctatgagagcatgggagtaaaaggctggattgcctttgaaaagaccgtgaactacatcaagcagaactatcctgaccagtttatcatcgccgatgccaaacgcggcgacatcggcaatacctctgccatgtatgcacgtactttctttgaagaactggacatagactcggtaaccgtagctccttatatgggcgaagacagcgttactccattcctcacctacgaaggcaaatgggttatcctgctcgcactgaccagcaacaaaggttcgcacgacttccaactgacggaagacaaaaacggtgaacgtctctttgaaaaagtattgcgcaagtcacaggaatgggcaaacgacgagcaaatgatgtacgtggtaggtgccacccaaggacgtgctttcgaagatattcgtaagattgttcccaaccacttccttttagtgcccggcgtaggtgcacaaggcggttcattggaagaggtctgcaagtacggcatgaacaagacctgcgggttgattgttaactccagccgcggtatcatctatgtagacaagaccgaaaatttcgcagccgctgcacgcaaagccgcacaggaagtacaggctcagatggcggaacagctgaaagcaatactctgagaagcaaataaaaacttattttaaacataaccgggcagaatcggcgaaatgggtagttgttcgcctgattctgcccggttcgtatcaatacatgataatcccgcacgatatgctcgaaggtttcaaaaggaccaatctgtcatagcccgccacattgcaaatgttttcaaagaaggagaacttgacagagacagtaatatgcaaattttgcataatactatctcaaaatataaacctactgcgatttacaacttagaggttatcatctcaacacgactggtgatgaacttccttgtatagcatcatattttgtcatctcctaaaaacaaattacctttgtcctcaaatacttagctatgccttacgaacgtaaaatcatcaacgatccggtgttcggattcatcaacatacccaaaggactgctgtacgaccttgtacgacatccccttttgcaacgcctcacccgtatcaaacaattgggattatcgtccgtggtgtatcccggcgcacagcatacacggttccagcactcactgggggcattctaccttatgagtgaagctatccagcaacttaccgccaagggaaacttcattttcgacagtgaagcggaagccgtacaggcagctatcctcatgcacgacatcgggcacggtccgttctcgcacgtgcttgaagatactattgtaaaaggtgtctcgcacgaagacatttccctgatgctcatggaacgcatcaacaaagaaatgaacgggcaactgacacttgccatccaaatattcaaggacgaataccccaagcgtttcctccaccagctggtaagcggacaactggacatggaccgcctcgactacctgcgccgcgacagcttctataccggagtgacggaaggtaacataggttcggcgcgcatcatcaagatgctcgatgtaaaagacgaccatctggtcgtagaatccaaaggaatctactctatcgaaaacttcctcactgcacgccgcctgatgtactggcaggtatatctgcataagacatcggttgcctacgaaaagatgctcatcagcaccttgctgcgtgccaaggagttagccggcaaaggcgtggacttgtttgccccgcccgcactgaaattctttttatacaatgatattaaccgggaaatattctacaataacccggactgcctggaaaactttatccaactggacgacaacgatctttggactgccctgaaagtatggagcacacatccggacagggtgctttccacactaagtatgggcatggttaaccgtaacatattcaaagtggaaatctccaccgaacctttcagcgaggagcgtaaagaagaaatcacccggcaaatcggcgaacagctggatatccctctttccgaagccggttattttatctctaccccaagcattgagaagaatatgtacgacccggcagacgacagcatcgacatcctgtacaacgacggttccattaaaaatatagccgaagcatcggacatgctcaacatctccctactctcaaaaaaagtaaaaaagtactacttatgttatcaacgtttgcatagataagtataaaatattcaccgcaggacaaggatatataaaaaaaaagtccgttatttgtgttttgaaaccatctaacaacaataaaacatggagttctctgctaaacaaattgcaacatttatacaaggagaaatcgtaggagacgagaatgcaaccgtgcataccttcgccaagattgaagaaggaataccgggggcaatctctttcttatccaaccctaaatacataccttatctgtatgaaacccaatcgagtattgttttggttaataaggatttcactcccgaacaggaagtaaaagctaccatgattaaggtagacaatgcctacgaaagccttgccaaattattaaacctgtatgaacagagcaaaccgaaacgcaccggcatcgacccgcgcgcatacgttgccgaaacagccaaaataggcaaagatgtttacattgcgccttttgcttatgtaggagaccatgcagaagtgggcgacaatacggtaattcatccgcatgccactatcggaagcggcgctaaagtaggcaatgattgcattatttacgcaaatgcaacaatctaccacgattgtcgcgtaggcaaccgttgcatcctgcatgccggctgtgtaatcggtgcagacggtttcggtttcgcccctactcccgaagggtatgaaaagattccccaaatcggaatcaccctattggaagacaatgtggaaatcggcgccaatacgtgtgtagaccgtgccacaatgggagcgactatcgttcacagcggtgtaaaactggataatctggtgcaggtggcacataatgatgaaatcggttcgcatacggtaatggcggcccaagtgggcatagccggttccaccaaagtaggcgaatggtgtatgtttggcggtcaggtgggtatagccggacacatccacatcggaaacaaagtgaaccttggcgcacaatccggtgttcccagcagtattaaagaaggcagtgtattaataggtacgccgcctatggaagtgaagccctacttcaagtcacagtccgtattccgcaagctgccggatatatactttgagttgaatgcgctccgcaaagaactcgatgaattaaaaaaacaattaaataagtaaccaatgttgaaacaaaagactctgaaagacagcttttcactcagtgggaaaggtcttcacactggacttgatctgaccgttactttcaaccctgctccggacaatcacggatataagattcagcgtaccgacctggaaggtcagcctatcattgacgctgttgccgataacgtgaccgaaacgacacgcggcaccgtgctttccaaaaacggggttaagataagtaccgtagagcacggcatggctgcgctttacgctttgggcatagataactgccttattcaggtgaacggtccggaatttcctatcctggatggaagtgcccagtattatgtcaacgaaatagaacgtgtaggtacggtggaacaaagtgccgtaaaggatttctatatcatcaaatccaagattgaattccgtgacgatgccaccggttcatccatcatcgtattgcccgatgaaaacttcagtctgaacgtactggtatcctacgactcgaccatcatccccaaccagtttgccacattggaagatatggcaaagttcaaggatgaagtagcagccagccgcactttcgtatttgtacgcgagatagaaccgctgttgcaagccggacttatcaaaggcggcgacctggacaacgccattgttatctatgagcgtgaaatgccgcaggatgcctacgacaagcttgccgacgtaatgggcgtgcctcacatggacgccaaacagttgggttacatcaaccacaaaccgctggtatggcccaacgaatgcgcccgccacaaactgctggacgttatcggcgacctggctctgattggcaagcctatcaagggacgtatcattgccacacgtccgggacataccatcaacaacaagtttgcccgccagatgcgtaaggaaatccgtctgcacgagatacaggcccctacttacgactgcaaccgcgaacccattatggatgtaaaccgcatccgtgaactgttgccgcaccgctatccgttccaactggtagataaagtaattgagataggtgccaactacatcgtaggtgtcaagaacgtaacagccaacgaacctttcttccagggacacttcccgcaagaacccgtcatgccgggcgtattgcaggtagaggccatggcgcagacaggcggtttacttgttctgaattccgtagacgaacccgaacgctattccacctactttatgaagatagacggcgtcaagttccgccagaaagtagtgccgggagatactttgattttccgtgtcgaactgctggctcctatccgccggggtatctctactatgaaaggctatgtatttgtaggcgaaaaggtagtgtgtgaggctgaatttatggctcaaatagtaaaaaacaagtaaattaattatgataagtcccttagcgtatattcatcccgaagcgaaaatcggggaaaacgtagagattgctccttttgttttcatcgacaagaatgtggtaatcggcgataacaataagattatggcgaatgccaacattctgtacggttcacgcatcggcaacgggaatacaatctttcccggagctgtaatcggtgctatcccgcaagacctgaaattccggggagaagagactagcgccgagataggcaataataataccatccgcgagaacgtgacaatcaaccggggtacggctgccaaaggaaagacaatcgttggcagcaacaacctgctgatggaaggtgtacatgttgcacacgatgcctttatcggcaacggttgcatcatcggcaattccacaaaaatggcaggcgagattgtcatagacgacaattccatcatcagcgccaacgtactgatgcaccagttctgccacgtaggcggattcggcatgatacagggcggatgccgcttcagcaaagacataccgccgtacatcatagccggacgggaacccatctgctatgcaggcatcaacatcgtgggactgcgccgtcgcggtttctccaacgaaaccatcgaggccattcacaacgcctaccgcattatctatcaaagcggactgaacaatacggaagctttgaaaaagattgagaatgaaatggaaatgaccccagaaatcagctatattgtaaactttatacgcgaatcggctcgcggcattattcctgcaagcaaataaaaagttaataatatgatatatagatttaccctcatctccgatgaagcggacgacttcatcagagaaatacagattgacccggaagccacgttctatgattttcacgaagccatcgtgaaatcagtaggttataccgacgaccagatgacctctttctttatctgcgacgatgattgggaaaaggaaaaagaagttaccctcgaagaaatggacgacaatccggaaatagacagttgggtgatgaaagacactcaggtcagcgaattggtagaggacgaaaagcagaaactcctgtacgtgttcgactacatgacagaacgttgtttcttcatcgaactctccgaaatcatcaccggcaagaatatgaccggagcaaaatgcaccaagaaagccggagaggctcccaagcagaccgttgactttgaagaaatggctgctgccagcggctcgctcgacttggacgaaagcttctacggcgaccaggacttcgacatggaagacttcgataaagaaggattcggcggtttggacgatggagccgcaggtattgcttacgaagacgacaaattctgataaaccggttcgggcgaatagcacctgctccaatgacaacgagacttcccttgaggatacattcgtttcaaaggatgcaattgtttttcgcccgaattattttgttgcaatctcatgaaaacattgatagtacttataggccccacgggagtaggaaagacagaactcagtctccgactggcggaacacttcggaacatgtatcatttccgccgattcacgacagctttatgccgatttgaaaatcggtacggccgcccctaccccggaacaactgcaacgggtacggcattactttgtaggcacactgcaactgaccgactattacagtgccgcccaatatgaagccgaagtactgcaacttcttgagcaactctatacccggcacgaggtcgtactcctgaccggcggctccatgatgtacgtagatgccgtatgcaaaggcattgacgacattcctaccgtagatgccgaaacccgccggcttatgctgcacaaatacgaaacggaaggtttggagcacctctgtgccgaactgaaactgctggacccggaatattacaaaatcgtagacctgaagaaccacaaacgggtaatccacgcactggaaatctgttatatgactggcaagacctacacctctttccgcacacagcaaaagaaagagcgccccttccgcatcatcaaaataggactcacccgtgaccgtgaagaattatatgcccgtatcaaccaacgcgtagaacagatgataacggacggactggtagaggaagcccgcagtgtctaccctcaccgtgcactcaattcactgaacaccgtaggctacaaggaaatcttcaactatctggacggtgaatggacactgccttttgccattgagaaaatccagcagaattcacgcatctactcccgtaaacagatgacgtggttcaagcgggacgaagagatacgctggttccatccggaacaagaaacggagatacttgcatatctccgttcccagctatcgtaaacctgcccgcaaccggcacagcccctaaaacctttccgagcctttgcaccccggctatcgtcaaggcaaagccgttattgtctttttcagccttatgtcctggctggatgcgcctatcataacctcaaactcgcccggctccactgtccagttcatattgcggtccagaatctgcaagtcttccggcttcaaggagaaagtgacctgcctgatttcacccggttgcaaggataccctctcaaaaccgcgcaactgcgaatcgtaggtaatgacactgctcaccttatcgcgcacatacaattgcaccacctcgtcacccgcacgttttccagtattcgtaacgttgactttaatcgtatattcgccctgcgtatgctgttgcaacggagagacttccaaatcggagtaagcaaaagtcgtatagctcagaccgaaaccgaacggatacagttcgccgatgacgcgtgttgcgcccgaaccgtttggaccggaatgcggttgagcgccatgcgaaccgggtttgaaagggaagttcagctctatctgtcctacgctcttagggaaagtcaccgtcagcttgccgcccggattatgctcgccaaacagagtctccgcaatcaccgttcccccctgacaaccgggaaaccacgactccaagatggctgggatataagcatttgcccagttgacggtgagcggctgcccgtttatcagcaccagtatcaccggctttcccgttgcatgcaatgcctcaagtaattgctgctggcgtcccggcaagtcgagcgaagtacgcgaacggctctctcccgtacgatactcatcctcgccaagcacggcaataatgacatcactttcaccggcttttgctacggcttcggcaatgccttgtttttcctgttcgctcatgggcgcaggcaatatctccgtggcaggccaacctgcatccacaatatcacagcctttggcataatccacttcggcaatgcctttcagataattacgcaaaccggcaagcacggtaaccgtctccagtccgttagggccgtaacggctggtcataaagttatcctcatcagccaatgggccggtcaccagcaccttctttatctgccgtttatccagcggaaggatattattctcgtttttcagaagcacaagtgcctgttgctgcatctgcttcacaaaatccatattccggtctgccccgcctactctgtcggcggctttcgtatcggctacataaggttggtcgaacagtcccaagcggaatttcacccgcagcacttccgacacacgcttgtctatcacagccattgaaatcttcttttcttccagcaaccggcggatgggcagaataaaatcggaaggcggagtaaagtgggtacgcacattcaaaccggcttccaaaacctgacgcacagcctcatcataggtatccgccacatgatgcttggactccacaaactccacagcctcgctgtcgctcaccacatagccgtcgaagccatactcctcgcgcagcaattccgtcaggaaatagtagctggcggatacaggcacaccatcccaatcgttataactgctcatcactcccataggatgcgagttctgaatgaccttcttaaaaggataaagaaacagttcgtgcaactcgcgcggagccacatgcgggtcagtacggcaattcccgtcacgcccgcctttgggcacactgtaaactgcatagtgcttcaaagtagcagctactccctgcgactggatgccgttcaccatttccgttcccaaagccgctatcagatagggttcttctccataacactccaatgtacgtccccaacgcgggtcgcgtacgatatccagtatgggagcatacacattggtatatcccaacgctttcgcctcttgtccggctatgacaccggcacggcggacaagttctttgttccaggtgcttccgatggcaataggagcaggcaacggagtggctttggtgtggttcagtccgtgaatcccctcattcgtgaagtcaacgggaatccccaaacgggtttcttccacaaaccagcgttgcacggtattgacggcctcggcatgattgctgaaagggtacaataaaccgggaacctgcgcagacttctttcccacgccgttcagcatctcatcgatattggcaatgccgtctttccatatttcgtttttccagccggcaacgggcagggaatcctttaacacacgtccgtagccgtaaagggttgccagttggcaggttttctcttccactgacatttgggagagcaggtcggctacccgcttttcaaccggttgggaagggtcttcataaatgtccttcaccccgttcttgttgaaatcgatccaaccgttccgatacattttcttgttttgcgcctgcacatttccggcaagccccagacaaagagcggaaatgcagataatcagtttgtgtttcatgtataaaatcaataataagtaattaaagttcaaataattccgcatattcggcttcaatgaacgcatccagttcattatagagcgactgcatcgcctttacatccgcttcccctttcctgcgccactctttcaataccggtacggtgcgccggaacacctcatcctctaccggagccagcaactgcatatagccgttcttatcggtattataaagcctttcccagttcatatagcggttgctgcccataccttgcccgtaagagaaaacatcccctgccagtattaccgaccaattgcccaaaggagaaaccttctttgcttcatcgcgaaccagcaacctcggcaaagccttgtccgcccctttcacccagacgggcattgccactccggtaggcggataccccagaattgtccacatcgtagtgagttcgggccgctccccttctttcacgccctgcaccaccaccgaacttgccgtactgctgcgtgcgatgaagtcctggtctacaaaccaccccgttgtcttaggacgattgaaatccccgctcttcaaatcaatccccaaaagcggattggcaaaagagcgggaaagctccctgaatatccattgcggcgtaatctgtcccgtagcagaggccggcatcagcagcttatcttcctgcataaagcgaacataacccgctccctcattcaccttgccggaaaaagagaagttggtgcgtgcaatgtacccgcaaggcgcatccttaggattgttggcatcgtacatcacatactcgtaataatccacttcgaacatggcagcgccgcctttggcatcaatcacgccgaagttggcctctatcaggctgggcttggacagcgtatcgagaaattggcagaaatccttcaccgtggcacacacttccaacgcacgccgcattacccgtccgttagcctctccacgctcctcaccgggtttcacctcgaccagattataggattgcgtattcataatggagaagcccgcggcgttcgtacctatccacacatccgtcggattgtcttccacactgttcacaacggctacaaaaggatagcgaccgccggagaagtatctcacgctgttttgcggaaagtccgtatcgcggttcttccacaacaaaggacgtccgtcgggggtaaccttgccggaaattacggcagaggtacaggcggaaagcggcccggcgcttcccaaagatacaatggcggcaatcaaggccaataaagtccgtttcatagcaaagaagttttaccgttaatctcgacaaagataaaaaatcaatccggattagtatatcacaccggtcaaaatacctacaaatagcgattgcagttctcgaagaaaagccgttactttgcgcccgaaacatagagtggaaaggaataacctgcaatgaatgaacaacataaatatcgggctacggacaagatgagcgacctcatctgcgacaattactccttattaatggtgatgagccgtttcgggctgtcgctcggcttcggagacaagagtgtaaaggatgtctgcgaagcccagcatgtagactaccgcactttcctcgccgtagccaatttcatcagcgaggagcaatactcgtacagtgcggacaatgattcattctcgattccggcactgatggattatctgaaacgcgcacacgcctacttcctcgacttcaacctgcctgccatgcgccgcaagctgatagaagccatagactgctccagagacaatgatgtggcctacctcatccttaagttctttgacgaatacgccaaagaagtgcgccgccacatggaatacgaaaacaaagccgtcttcacttacgtggagcaactgctgcaaggcagaccgtccgatgtgtacaacatcgccactttcgccagcaagcacaaccagatagacaccaagctgaaggaactgaaaaacatcatcatcaagtactatccggaaaaagagaacaacaatcttctgaacgccgtccttttcgacatcttcaattgcgaacaggaccttgcatcgcattgccaggtagaagactatatgtttgttcccgccgtagcgcaaatagaaaaaaggctgaaagatgaacaataatatttctctgaaaatagttgttgcagaaacttcggtcattgtacgaagtggtcttgcggcagtgctcaaacgcattcccaatctgaatgcgcaccccattgaggtgtcgtcaccggaagcattgcagaactttatacatctgcacactcccgatattgtaatcgtaaaccctactttcggcggttggttcgacctgccctctttcaagacaaaccataacggaaacaatatcaaatacatcgcattggtatgttccgtcatcgacaataacgcgctgaaagagtatgacgaaagcatcgccatttgtgacgatatcgaaatgattaccacaaaaatcaaccgtcttctccataccgaagaagaagatgagaaggacagcgaacaggaaacgctcagccaacgtgaaaaggaaatcattacctgcgtcgtaaaaggcatgaccaacaaggcgattgccgacaaactgtatctgtctatccataccgtcatcacccaccgccgcaacattgcacgcaagttgcagatacattctcccgcaggcctcaccatctatgccattgtgaacaagctggtagaactgagcgatattaaagacactttataatcctttcttccacatagcctgccggaagaaagaatgcaaaacccgtttccccataggagaaaaacatattgacctgccattggaacttcatcagtccggcaggtatctccgccacatccgccacaaaacaaatccccgcttcacgatgtcgcatcggaaaacggggatccttttatcttcataaaagtggttacgtaattatgactaactaattcattctttaaatctgatgttgcaaagatacggcatcgcacccgatgccgcaatcacctgatataggtatattaaagaacaacagtcattataaataggtaacgccgccattcaaccatgtatttctgccaaccctatccctttgccacctcttccttaaccgctgcggacaattgctccagtgctttttgcagcaccgaacggggacagcctacattcaaccgcataaagccttctcccggtttgccgaacatcgtcccgtcattcagggctagatgagctttttctgcaaacagtcttgccaacttctcttgcggcaggcccaatgccctacaatccagaaaaacgagataagaggcctgcgggcgtatcataccgatgcccggaacatgttctttcagataattctccgtaaagtcgatattggcctgtacatatccgagtacctgttccagccactcttcaccgtgcgtataggcagctgcagcgccgatgtaagcaaataaatgcccttcgcagaactcgcccgcttccataaactcccggaaacgccgacgaatatcctcattcaccgctatggcatacgaactgcccaatcccggcatattgaaagccttgctgggagccataaaagtaagagaattctgtgcggcagcctcggacaccgtggcgaaaggatgatgcttataagggggtaaggtaagatccgcgtgtatctcgtcggaaacaaccatagtcccgctctctttacaaatatccgctatccgacgcagctcttcgaccgtccatacacgtccgcccggattatggggattacaaaggataagcaacctgcagccccggatatccttagagaaacactcaaaatcaatatgataatgcccgtcgtacaaatcgagcggagaatagaccacttcgcgtcccaagcgttcggtcaccaggaaaaaaggatggtacaccggagtcattaccattaccttgtcgcccggtttggtaaagcattgcagcgcaaaggcctgcccgcgtacaattccgggaacaaacgtcagcatatcacgcgtaacatcccactggtgacgcttgtgcaaccaactgcaaatagaggtataccactcctcacaggcaaaagtatatcccaaaacctcgtggtcgagacgacggcgcaacgcatccatcacaaaaggcggcgtacggaaatccatatcggccacccacatgggaagcaaatctttacgtccccacacattctccacgccgtcccattttacggagtccgtaccgcggcgttcaatcacttcatcaaaattatacttcataaggttcaagctattttaattgagtttccgagtttaacgacagtatataaaattattcgcaaaagtacgaaatatctttgcttttgagtaaatttgccaaccaatttaaaagagacatatatgattaaagccctgttttttgacatcgacggtacactggtgagcttcaagacccaccagattcccgtttccaccatcgaagcgctggaagccgccaaagccaaaggcatacagatattcatttctaccggacgtccgcgtatcatcatcaataacctcgccgccctgcaggaacggaaactgatagacggctacatcaccatgaacggtgcctattgttttgtggacgataccgttatctacaaaagtcccataccggcagccgaagtcgatgcactgacaggcttctgtcacgagcgcaatctcccctgcatactggtgggtgaacacgatatttgcgtcaatcagccgggcgaactcgtaacagagatattcaacagacaactcaaaacagaccccatcccacccaaaccctatacagacaaccattcggacaaggagtactaccaactgacgccctttatcgatattgaagaagaacaactcctgctgccttccattcccaactgcgaaatgggacgctggcatccggcatttgtagatgtcaccgccaaaggaaataccaaacaacgcggcatcgacgagataatccggcatttcggcatccgtctggaagaaacgatggctttcggcgacggtggaaacgatatcagcatgttgcgtcatgcaggcattggagtggctatgggcaatgccaaagacgatgttaaagccgcagccggttatgtcactacgagcgttgacgacaacggcatagccaatgcactaaaacaatacggaataatcgaaagttgagggttgaaagccagctatgcatatgtccttcgtacccgacactcagaacaaggagtttcaagatgccttgaacctcatacagtacacccgccagtctgttttcctgacggggaaagcgggtacgggaaagtctacctttctccggtatatctgcgaacataccaagaagaaacacgttgtgctggctcctacgggaattgccgccatcaatgcggggggaagcacgctgcacagtttcttcaaactgccgttttatcctctgctgcccgatgaccccaatttcagcttacaacggggacgcatccacgaattctttaaatacaccaaacctcaccgcaagctccttgaagaattggagctggttatcatcgacgagatttccatggtacgggcagatatcatcgatgccgtcgaccgtattttgcgggtttactcacgcaacctcagggagcctttcggcggaaaacaaatcctgctggtgggcgatgtattccagttggaacccgtagtgaaaggggacgaacgggacatactgaaccgtttctatcctaccccttatttcttctctgcaagagtattcggacagatagacctcgtgtccattgaactgcaaaccgtctaccgtcagaccgacaaggtatttgtcaacgtactggaccatatacggagcaatacagtaggcgctgccgacctgcaactgctcaatacccgctacggtacacagatagaacagtccgaagccgatatgtacatcaccctcgccacccgccgcgataatgtggattatatcaatgacaaaaaacttgccgagcttccgggagaccccgttacgtttcatggtgaaatcatgggcgactttcccgaaagcagccttcccacctctcaggaactggtactcaaaccgggcgctcaaatcattttcattaaaaacgatttcgaccgccggtgggtaaacggtacaatcggcattgtcagcggcttcgaccctattgaagaaacactctacatcattaccgacgacggcaaggaatgtgatgtgaaacgggagtcctggcggaatatccgctacaaatacaacgaagaaaaaaaacagattgaggaagaagagttaggaactttcacccaatatcctgtacgactggcatgggccatcactgtccataaaagccagggactgactttcagccgggtagtcatcgacttcaccggtggcgtatttgccggtggacaagcatacgtggcactcagccggtgcacatcgctggaaggaatacaactgaaaaagcccgtcagccgcgccgatgtattcgtacgtcccgaaattgtaggattcgcccaacgcttcaacaaccgccaggccattgaccgtgccttgaagcaggcacaggcagatgtgcaatatgtagcggcagccaaagccttcgaccagggagacttcgagactttcctcaatgaattcttcaaggccatccattcccgttatgacatcgagaaacccgtagtgcaacgtcttatccgcaaaaagctgaatatcatcaaccggctgaaagcggagaacgcctgcctgaaacaagacatggaaaaacagcggaagcgcctgcaagactacgcccgcgaatattatgccatggggaacgagtgcatcacccaagcccgcgacgcccgtgccgcccttgccaattatgacaaagcccttgaactttatcccgaatacacagatgcctgggtgcgaaaaggcgtcaccctcttcaacgaaaaccaataccaggaagccgaagaatgcctgaaccgtgccgtacgcttgcgccccgccgaattcaaaaccgtgtacaaccgtggaaagttgcggcttaaactcggaaacattgaaggtgccatagccgacctggacaaagccaccaccctaaagcccgaacatgccggggctcacgaactcttcggggacgctttgatgcaagccggaaaagaggttgaagcagccttgcaatggcgattggcggaagaactccgcaaaaagcgctcctcaaaataaaatccatccttatacatttgatttcaagaaacttattattacttttgtaatatacttttaaaccaagtccgacaatatcatgcttctgaaactttatgaaaagaacaacaacccggcagatttgcaacaagtaatcgacattctgaacgacgggggcatcatcatctaccccaccgacaccatgtatgccatcggctgccacggactgaaggaacgtgcgatagaacgtatctgccagctcaaaaacaccgaccccaaaaagaacaacctttccatcatctgctacgacctgagcagtatcagcgagtatgccaagttcgacaacaacacgtttaaattaatgaagcgcaaccttccgggcgcttttacctttatcttaaacggcacagtccgtctgccgaagatattccgcaaccggaaagaagtaggaatccgtatgcccgaccatccgataatacgggagctggcacgcctgctggatgcccctatcatgaccgccacactcccccataacgaaaacgaagacattgaatactgcaccgaccccgaactgattgatgagaagttcggcaatatcgtcgacctggttatcgacggtggaataggtggcatagagggttccacagtagtggactgcaccggtggcgaggcagaaatcgtacgccagggaaaaggctggctggatgaaggataaaattcaatctccgcatattcctcaaaaacatttccggctcttataatgtttctttttcaaagaaacaacatattctatgagtacaaaagagcaatactggaaatattcattgattaccatcattatcgggttggggattatcctcgccaggcaaatcactcccttcttaggcggtctgttgggtgcattgaccatctatatactggtcaggcgccagatgatttatctgtccgaaaagcgaaagataaaacggagcatagctgccaccgtcattacggcagaagccattttatgctttctcgttcctctggcattggtagtatggctggcggtagtaaacctgcagaacatcaaccttgatccgcaggcagtcattgcaccttttgaagaagccgcctccattatcaaggccagaaccggatacaatgtactaagcggaaacagcctttcattcttcatttcatcccttccacgcatcggacagacattaatgggaggcatcagcagcttcatcgtcaacatgtttgtactggtatttgtcctctacttcatgctgataggcggaaagaaaatggagcaatatgtcaacgaacttcttcctttcaatgaaaccaacacacaggagatagtacacgaaatcaatatgattgtccgttccaatgccatcggcatacctttgcttgccgtaatacaaggaggagtagccatgctcggctattggatattcgatgctcccaatattctgttttcaggctttcttacaggttttgccagtatcatacccatggcaggtacggcattggtatggattcccatagccatatacatggcacttatcggcaactggttccaagcaatcggactggtcatattcggttcccttgtcatctcgcaactcgataatctgatacgtttcgtcattcaaaagaaaatggccgatattcatccgctcatcactgtcttcggagttgttatcggcctctccctttttggatttatgggggtcatattcggcccgttactactttccctgttctttctctttgtcaatatgttcaaaaaaggatatctggacggagcaaaataaatcgctcctaaggtgtaaacagaacaaagcaccggactcccccgaaagcctcataaccgactttgggatggcagtccgatgccttgcatatcagaagagtccggctgaatacaacgtacctctacggaaaacgtttacttccggccggtttcctcattgtattccgatgttatgacgtaccggagtcaggataaacgtaaattcataatcagcataaggcacctgatactcaggacgggctatgcgtccccaactatcctcgcatcccaaaccggcttgaaccttatcaatgcagaagtttgtcaaatccgcctcttccacctcctgagagtgtccctggcgcttgctccagccttcatccaaagattcaatcgtatagtgtaaagccgatgcggagaacggagcggcagcaactgcctctataccgttaccggctgcatccagcatcttccaccagcggatatccgtctttgtgccattctcctgcggacggatatacggatagaactgctccgatacgctctggcgatagataccgaggtcggtacaatggttacggtctgcatagttctccaccggaccacggccgtagtattctacagtttcaaagctgcggggcataggcatctgcatgccgaaacggaagaggttggctactttggcatttttatcggcaaccatcttttgagtgattttaacagcaccactgtcgttgataacatatgtcagacttaactccgccgatgcttccggcagtttataagccgcttccacaatcacttgtccgttctcgatgtgctgactgaaagaagtcagttttatctccggattcttccagacagcatatttacgttgcaggttagcgccgaaatcattgtcggtaggagcacgccagaagttgggcgtaagcgcctcaccttccttaatcatatccaaaccgttcacttcgtatttggtcagataaccggtatgcctgttgaactccatgcggaaagcctcaccggagacaataagatagttgcagtcattctcctgtatcacgggagcagccacttccacgttgctcaattccgtgttcttcaaatccattgcaggagcctgataggcattcagcgtcaattggtctttagcaacaatatgccctgccggaagcagaccttcacgttccttcaatttataagacacgttaagcaaccactcggcacactggcagacagttcccaaatccagtttgactttagcagtctgctgcggagctacattcaggtcatccacacgaccgctgcgcatcaccttgccgtctttcagcatttcccactccagataacagcccgaaaggtcacggaagaagttttcgttgaatacattaatttctccacgctgcaaatcggccggagttgtccagatattctgatagatacgtcctacctcgtacatatgaggattgggtacgcggtcgggactgacaagaccattgttacagaaattgacatcgctggcatcaaagcggttgaagtcaccgccataggcataaatcatcttaccgttcttaccggtccaacgaacggactggtctacaaaatcccaaatgaaaccaccctgatatttgggatatttgcgaatcatatcccaatattctttgaaaccgccttccgaattacccatggcatgcgcatactcacactgaatgagaggtctgttcatagaatcatcctcacaatatttcagacaatcgttatatccataatacatcggacagaatatatcggtctttcctgtctttccggcctgttcgtattgcacggcacggctcgggtcttccgctttcacccagtcataagccgcttcaaagttagacccataaccggcttcattacccaatgaccagaaaatgatgctcggatggttgaaactgcgctgtacattatgctgattacgctccatatgagctttcttgtaatcggcacgtttggcaagagtggattcttcatatcccattccgtgagactcgatattggcttccgctaccacataaataccgtattgatcgcacaagtcataccacagattattatcgggatagtggcaggtacgcaccgcattcagattgaactgcttcataagctgaatatcctgaatcatacgctcacgggaaacgacataaccgtaatcaggatccatttcgtgacggttggctcccttgaacaggacaggcttgccgtttaccaatacctgcgcattcttcagttctattttacggaaacccacttttatgggaataacctcgccactgccttgcaaagcagcacgtaatgtataaagatacggagtttcagctgtccatttgtgcggattgtcaaggttcattacagcaaccccgttaccgcgtacagttgccgttgccacctgcttgccttcggcatccaatagctccaaggcggtattaccgttacctttcagactgacttccacacgcaaagagccgtttttgtagtcagcatccaaatccggagtgacacggacatcctcgatacgtttcttatcacgggcatacagatagcagtcgcgtcccactccgctataacggaagaaatcctgatcttcaagatatgtgccgtcgcaccagcggaacacctgaaaagctatcaggttcttctgtcccggtttcaggtaagaggtgaggtcgaattctgcctccagtttactatcctcgctgtaacctacatacttgccgttcacccacaggtacatattggaagtcaccgaaccgaaatgagctataatgtccttacctttccaagtagcaggcactacaatctcccggcggtatgaaccgacatgattatccacaacaggcacttgcggcggattattcttgaactgattgcgccaggcataacctacgttcacgtaaataggatctccaaagccattcagctcccaaacaccgggaacaggcatatcgcaccagcctttatcattgaaccccggcttccagaaatcaacggggcgggcgtctgcatctttcacccaaaagaatttccaagtaccgtttaaggtcataaaacgggaagagtgctctttaactcccgtctgtgccacgccttccgattcgtaagcaaaataattggtgtgcatcggggcacggttcacagcattcacttccggattctgccattcggtaaaagactgcgcgtttgccatcacagccagggcagtaaataatccggtaacaattcgttttttcatgatatctattatttattcaggtttgtatgctgcaaagataaaaactacaaatcaaaacccaaccgggttttaagtcaaaaaaaagaaaacatgggaaatatgtatgtacaaatagctatagaaataaacagaaaacaaacagccaaaagaaaattctacaattcgcaaaaaaaattatttctcagttgtttatctgcaaaaacatagtacataatcctattataaacgtacaaaaacaaagtgaaacatcagggaaaacctcgttccgcaattgggggctgccgggtttccaactggcaaccgcagagcctgcaactggcaaccgtagagcccgcaattggaaaacgaagttatatatgtaggtttactacattatacatctatcaaaatcacaaaaacaacaaggaataacaacttaaagcaaaaagcttttttcatcatttgccgaagaaagtcgctctaatttacctattgcataataggaaaagcgtgtacactataccatatttgcggctatgataaagaaaatgcaatgttttaaccgatattaacgcaattcattatacactactttcaatattgattataaggtaattagcatataaaaacggagaatataccgcaaaaaacagtgacgacaaatagattgtcatcactgtcgtcacagttgtcatcactcactctatcccctttccacagagggatagagagtaatccatgccaagtgatgacaaaaaagttatcaaacagtattgaaacagtaatattgataatgtatatattgctgacctaagcccaagaagaacggcttccatacggcagtccttccgcatttcaatatccattttaatattaaatacaagtaaagatgaagaaccactcaatctacaaacagaaaatatcgtatatttgcaccccaaccaatttacaggctcatggcaggcatctacatccatattcccttttgcaagacacgctgcatctattgcgatttctactccaccacccgcagcgaactgaaaagccgctatatccatgcgttgtgcaaggagttgcagatgcggaaagaatatctgaggggagagccagtcgaaacgatttacttcggtggtggaaccccctcacagcttgccgaagaggatttccgcgaagtatttgaaaccatccggaaatactatggaatggaacactgccgggagattaccctcgaagctaatcccgacgacttgaccgaagcctatgccgccatgctgcaaaatttgcctttcaaccgcatcagtatggggatacagactttcgacgattccactctgaaactgctaaaccgccgccataatgcagcacaagccgtcaatgccgtaaagcactgccgccatgcaggcttcaacaacataagcatcgaccttatctacggactgcccggcgaaacggatgaacgctggaaacgtgatttacaacaagccgtcagcctcaacgtagagcacatctccgcttaccacctgacatacgaagaaggcactcgcatttacgagctgctgcaagcgcaccgtatccgcgaagtagacgaagaaagcagcgtccgattcttctccaccctgatagatacgcttggcagtgccggctacgagcactacgagatatccaatttctgccgttcggacatgtattcccgccacaatacatcttactggaaaggaattccttacttgggctgtggcccttcggcacattcattcaatacggatacccgcgaatggaatgtggcttccctggaaaaatacatacatgccatcgaaaacaatcaacgcttgtccgaacaggagcatttggaccggaccacctgctataacgaatgcatcatgacttccattcgtacccgttggggagtgcccctgaatgatatagaacagaaattcggcaaagaactgtggcaatactgcttcgatatggcacgtccgcatctggactgcggaaatctggaaatatacgacaacaaccgtctctgtcttagccgtaaagggatttttgtatcggatggcattatcagcgatttaatgtttgtagaaagctaaagtatactttttcaactgagtgaaatagctcttcaaaaggaacagcagaaagggctttcgatgagaagataataattgagtaaatgtaatcagttataatcgtaaggatttgatgcacaactgaataaatatagtaactttgtaaacgaattaaagaaaagtatggctaagaacacaaagatacaaacggttgataacttgacggataacttccgtggctatgcggcattgcttcgcaaaatcaagcaacgggtactgattgcccagcaacggataatttatgccgccaacgaagaaatgcttcggatgtattgggatgttggcgaaatgttacagcaaagccaagatgcagacggttggggcaagaaaaccttacaacggttggctgtggatttgaagaatgattattccgagataaagggcttttctgtacgcaatatgcagtgcatgatacagttcttcaacgaatataatcaggaacttacaatggtgaaaggagcagtttctccaattacgcaatcactgattgcgcaattagaaaaatataatttcaccctccccataaagcatttgggatggacgcataatcttattctcttacaacaggtcaaggacattcgggcacgttattggtacatgattcagagcattacatcgcattggaatacacgttatctgcaagaagccatcaaacttgacgactacggcaagcacggagcgttagcaaacaacttcactgaaaccctcccagcaccggaagcaaacgatgtgaagtccatgctcaaagacccgtatatattcgatatgctgactttcaccgaccaatacaatgagcgtgatgtggaaatcggcttggtgaagcatgtagaaaaatttctcgtagaaatgggagctggattcgccttcatggggcggcaatatcacatagaggtgtcgggcgatgattattacatcgatatattaatgtataatgcattcctgcacagatatttagtgattgaattgaaagatacggagttcatgccggaatatatcggcaaattgaatttttattgttctgccgtggatgatattctttgtcgagagggagataaccgaacgattggattgttgctttgcaagagcaaagaccgtatcaaggctgaatatgccttgcgtgatattcagaagcctatcggaatctctgattatgaattagggcacgccttaccgaaagacttccgaggtagtttgcctactattgaagaaatcgagaaagaattggcatctgataatcagtgagcaatttgagacatcctatccacaacaaataatagatatgaaaccaataacagcaatcatagtatttttctctttgatgtttcctgcattgttccttggatacaacaattatgcagaagcaaaagagaatataatcaaagatgtaaatcaagctttggcaaaaactgtaatatataaaatgccaacaaagattactgcggatacattacaagttttcaagtcaaatctgcaaataaaccaattaaaggaaacatcatatccgcatctggactgcggaaatctggaaatatacgacaacaaccgtctctgtcttagccgtaaagggatttttgtatcggatggcattatcagcgatttaatgtttgtagaagaatgaaagcgttccactccattctacaagcatttctttttgtatacttataatgcatattctctatcacattaacacataataccctttaatattacatttgcattacaaaacagaactgtttttgtgcattttcacaatcaccaattgatataaatcaagaaatgaaggtaaaacctgcacttttctttattttcatttttgtgttataaaacataatcatacatttgcataggtaaaaagaaaagctagacgcttacgactgttttcagtaggtattagatttttattagattagtttttaggtataacaattaaaaaagtaggtattatgaaacgttttggattaacattagtggcagccgtatgtctgtctgccagcacattcgcagcaggaaaccagccaacaactgcaagttgggaaggtaacatcaatgtaagcaagctgagcaaatatttgaaattgtccgctaaccagcaaaaagaggttaccaacatttgcgaatactttaacgagcagatgtcacgtgccacaaactcaaagaaaaatcaggaaaagttgctacgtaacgctatttacggtaatctgaaattaatgaaaagaactttggatgaaaagcaatattccgactatgcaaaagttttgaacgttacactgcagaacaaaggcattgaagtaaagtaacatgtatttccggcataggtacggaaaacatataaaacagaaaaaggataccggcaaatgtccccggtatccttttttctgtttgtcaacattgttagagtaatggacattcaacttcacataccaatcatcagcctgctttcacaaacagaaacgttcttgcaattccttcttaaatttcttcgagacaagtaactccgtaattttatcaaaaggcgggtatagcacacacctgttatcccgtatgagcatcagataatctatattgataatatacgattgatgtatctgcacaaaacacggagagaacgatgtaatctgttcggcagtcataccgcggcgcaaagccagaggcaactggtcattcagcacgacctcccactgtttgcgttcggaacaataacggaaaaatcctatctcggcagggcgcaacgcacgcatatcattagttggagtaaaaacgatgaaagtctgtccggtatgcatgggatttcctaccggaaacgatacccgctgcccggtggtttcaacctgttgggtaaagcgtgtcagaatctctttcaaatcccgttcatcgaaaggtttcagcagataatcgaatgccgcttcccgaatagcctgtatcatatacttgtcgtacgccgtataaaatacgaccctcatattccacgatacataatcgcgtatctcctgcaacagttccagccccgtcatgtccggcatctctacatccaaaaacagcaaatcgggttgcactttcataataagcttcttccctttcctaccattccgtgcagtaccttccaaagagaagcgggcatctttccacaactcaaagctcaaattttcaagagctacgtcatcatcatctactataacgactttgtatttgtccatattccatgttttggtctggcgaatataaatattttctcgtttccatacaaaacagcaaataggcatttacgaactattcttccgcagccggctctatcaataaaaaaaatgccactaagcggttactcttaaattctataatcgtacttgtccggtaataaaaaagttacttcacagccggtttcaccactcggcaaagtgacattatgtacagatatatcaattgcagcctgatttttcatattcaaaatctggattgtttgcatgatgactttcatacctgtaccagtgcctctgttccggctctccggatggtaaccgccgccgttatccgtaatcctgatgcaaacaccgccttcccgacgatctgcggcaatccacagattccgctttccttccttgccacgcaatgcgtgtttcacggaattttccaccggaatctgtatcatcatggaaggtagccagacctgctcgggcagtacatctccggctatttcaataaccggatggaaagttgctccgagcgaacggcgctccaagtcgatatacgtcttgacaaagtccagttcttcggttaaggtgacacacaactgctccgccagctccagatttcgacgcatcagtttcaccaacgataccaactcctgcttttcctcttccttgtggtttaccacctcctgattgagaacgttgaatataaaatgaggagacaggcggttgcggatgttctcaagacgaagtgtagagaccgttcttcggttttgggcaagcagcagatcccgctttttcctattataaagaaataggaaagctgcaatcaaaagggcaataacggcaaccgctaatgtcacgagacgggtctgcctcaatatcagcatctcgttttcctgtttctggaacagcactttatgtgccattaaggtagagtcctgctgatagcgcaatgtcaaatctgccgtacgcatccttatacgctcattgcgaatagagtcgtccagacgtttattctctttcaagtaatcatacgcttgcctatagttgccggtttcttcgtaaaactgctgcaaatacttgttacggatatgtatcatgtctgcatctatttccggcgaagccttactcatcgccaacaatcgccttgcctccgcaaagtccttgcactgcaacgccagttctatcttttgagtatcaatataataaagagcagtagtagaaccgagttcttcaaagaacggctggcataactccaggtatttgactaccgaatcggttttattcagttgcagaaagcagtcgctcaggttcagatagctcagattaagcgcccaagacatatcggggtaatctttcacaagctccactacttttctaaaataaccgattgccgtggagtaatctccccggtaataataagagtttccacgattattcaggtagaaatgcttctcatccggaaacatatccgcataattcttgcccgcaagttccgaataatagtcgcattgctcgtaatcgcgcaaagccaggtatccttgtgacaatccgtaataaatagagattttctttctgtaaggcatcttcagcgaatcgcacatcagcagagcctttctataccaaaaagcacccatatccggcctgcccaaatggttggtagcatcagcaagatttatcaggatatcaggaatcacctcgaattttgttcctttcaatcttgcttcataggcctccttgaagcagaccgcggcagaatctatatagccttttcgcgaatagacattaccctttatattaaaacattcggactgcaaatcggccaaccgatgcgaaaaagactgtctgccggcaaacgcctcaacttgccggagcaaaagttgtgcggagtcgaagtcggaagtagccagacaggttttcaaggcaacagcaagataattataccgcaccatactatctttggtcctttccattctctgtaatgcctgtgctttcatccagcgcggcgccatcactacggaatcgctgtgagtgctgaaaaaagaatcgaattcctgcatttcaaaaactctgccactgccgcctttataagtacaggcacccggcaatgccactgccaaacatagaaagattaagataagaatcctgttttccttaccaacctgcatcgcatataccttattttaccgtcaccatagtagctccaaatccatactcctgaaaggaagcatcctgcgtcttacaagtcggatatttccgtttcagctcatccagcaacgctttacgaagcacaccgtcacccttgccgtgaataaagactatgcgttgttcacgcttattcctatactgttccatcacctcacgaaatttatccagctgatagttcaatatctcgctgttactcatgccgcgcgtatcatccaacagttcaccgatatgcaggtctatttcgatgatttcatttttgccgccccgcttcacgatagtccggggtctggacggaccgtctgttgctttcttttgcatcagagcatcctgtaagtcctcagccgacacataaacctgcctggcgggagcatcattcctcactacatcgtacaccaatgctggagtatcaaagaaatcggtaggctgaaaagtatgcaacttatagaatttcaccgtatcgatgcggatttccacattggcagcaggcttcatagcgaaagagcggttgtccttgaacgccaccaactgaacagctacacgctcccggtcgttcaattccgatttttcaaattcctctaacaagagtttcgtattcggttctatcaaaccatgagaacgggcagtccacgacttgccctccgcactcgaataggtataatacatgcagtaattgctatcattcaccaaataagcctcaaacggagtagtgcttaccgccttgatatcttccggaacaaaggcaagatacacattcagcacatctccgcctttcatttccggctgacgataaacagatacctgaggtttagccgtacactctatctgccgtccggagtccaaaacggaagataccggcttcgaggctaccgaagccatacgcgcagccgattgctcctccgccttcttcttggctgctttggaagcaggagtaggaatattgtaatcatccgtttcaatcaccacacattcacgcaccggcatcggaatgtcaaacccgtcggcatcttccaccaacactatatcttttccccggaatcccgttacaacaccgccacctacttcactgaggaagcgcactttatctcctattttcataatttccattctgttttttaatcattatccggaagacacatcggaaccattataaacatacggttcagacatcttcttttatctctcgcaaagttagaaattatttgatgattatatacaaacataccttttttgtattggcaagaaatacattgtgtatccatgaaccggaatgaccttatgactgatatgtcattaattggctgtatataatccaaatcttcccaaatatccgtacctttgcagtcccctaataaaataaagatatgaaagaagatcccaaacatattagaatcagcgaattcaattatccgttaccggatgagcgcattgccaagtttccattgcctgtgcgtgaccaatccaagttattgttgtatcgccacggcgaagttaccgaagacatattcacttccctgcccgactatctgccggcaaacagcctgatgattttcaataataccaaagttattcaggcgcgtctgcacttccataaagaaacgggagcgcttatcgaagtattctgtctcgaaccgatccaacccaacgactatgccctcaacttccagcaaacggagcatgccgcatggctctgcatgataggcaatctgaagaaatggaaagaaggtgcgctcaaacgggaaataaccgtgaaaggaaagccgcttaccctgaccgccgaacgcggggcgtgccatggaaccagccattgggtggatttccgctggaacaatccggaaataacattcgccgatattctcgaagtgttcggcgaactacccatccctccttatctgaaccgggagacgcaggagagtgataaggagacttaccagaccgtttattccaagataaaaggttcggtagccgcaccgacagccggtctgcacttcactccgagagttctggacgctttgcgtgaaaaaggggtagcattggaagaactgaccctgcacgtaggagccggcactttcaagcccgtcaaaagtgaagagatagaagggcacgaaatgcacacggaatacatatccgtcaataggagtacgctggagaagctggtagcacatgaaggaaaagccattgcagtagggacaacctctgtacgtacactggaaagcctctatcacataggcgttactctgctgcacaatcctaacgctacggaagaagatttgcatgtaaaacaatggcaaccttatgaaacggcgcttgaaacagcagcaacacccgctgtagatgctttgcaggcaatcatagcctacctcgaccggcatcacatggaaacgttgcattccagcacgcaaatcatcattgctccgggatacgaatatagaatcgtaaaagccatggttaccaacttccaccagccgcaaagcacattgctgctgcttgtctcagcgtttctgcatggagattggcgcaagatttacgattatgcgcttgcccatgatttccgatttttgagttacggtgattcgtctttgctgataccgtaactattctcggagaatgcaccattttcatcgataaaaccaacaaaaagctcagaattaatgaatagcgacaataaccaggaaatgtttcctcttgttgacgagcagggaaacatcataggtgcagccacccgcggtgagtgtcacaacggaagcaaactgctgcaccccgtaattcatctgcatgtattcaattccaaaggagaattatacctgcaaaaacgtcccgaatggaaagacatacaacccggcaagtgggatacctcggtaggcgggcacgtagatttaggcgaaagcgtagaaatggcactgaaacgggaagtgcgcgaggaattagggataaccgacttcgcaccggaaactatcaccagctatgtttttgaatccgctcgcgaaaaggagcttgtctttgtgcacaaaaccgtatatgacggagagatacatcccagcgacgaactggatggcggacgcttctggcgtacagaggaaattaaagaaaatatagggaaagggatattcactcccaattttgagcaagagatagggagaatcattcaactgtaacaacataaaaaacacagaaacacaaagatacagagtttagctgtctactctctgtatctttgtgtttctgtgttctaaagaacggtacaattattttgccaagtcttcaattactttcataatctgctgaccgatttcttcggctgcttccggcgtagccgcttcgctgtaaacgcgaataatcggttccgtgttactcttgcgcagatgtacccatttgtcgggaaagtcaatctttacaccgtcaatatcattgatttcttcgttcttatagatttcttttactttggcaaggatggcatcgacatccgtatccggagtcaggtctacacggttcttagccatgaaataggccggataagtggcacgcaattcgctaaccttcttaccttcgtgcgccaggtgactgaggaacaaggcaatacctaccaaagcatcgcgcccgtagtgactggcaggataaataactccaccattgccttcgccaccgataacagcgcctacctctttcatcttggtagttacattcacttcgcctacagcagaagcggaatattcctgaccgtacttacgtgttacgtcacgcaacgcacgggtagaactcaggttggaaaccgtattgcccggagtgtgcttcaacacatagtcggccacggtaaccagcgtatattcttcaccgtacatcttaccgtcctcacaaatcatggccaaacggtctacatccgggtctaccacaaaagcaacatctgccttaccgcctttcataaggttcatgatgtcgcccaaattcttttccaaaggttccggattgtgctggaaattaccggtaggctcgcagtagagtttctccacatgcttcactccgagctgttccagcagttgcggaagaatgatgccgcctacggagtttacacaatcaatggctacacggaaatcggctttcctgatagcttccacatccaccaggtcaagcgccaacacactgtcgatatgcttttggttataagtaaggtctttgcgataagagccgagcttgtccacttcggcaaagttgaactcttcagcttcggcaatacgaagcacttcattgccctcctccttgttcaggaactctcctttctcattcagaagtttcaaggcattccattgcttgggattgtgagaagcagtcaggatgatacctccgctggcaccttccatggtaacagccagttcggtagtcggagtagaagccaaatcgatgtccactacatcccagcccatacccatgagcgtgcctaccaccacattctttaccatctcgcccgagatgcgtgcatcacggcctactacaattttgttgctttttactgtacacgttttgcggataagcgtagcgtatgccgaagtaaacttcacaatgtcgagcgggttcaacccctcgcctgcaccaccgcctattgttccgcggattccagagatagatttgattagagtcataggttaattatttaaataaatggttagttatttccagatttgatatttccggatgtcataaaaataagggtagacatattgcatagctgtctgatgccccatcttggaaggaacaatcagtttgacatgagccatgtcgcgaacataagtcaacgggacaagccagcctgccggaactgtcggtgaggaataataagtcatcatatatccctgcaggaatgtacctgcaatggacgaagaagtcaccgcatagcggaatgcatctacggtttccaccgcattcaggttggacaatgtggtatctttgtcaagaatgctatattccataaaacgcaccagcacttcatcgttgtttttcacagtgtcggctgcattttcagagcctttatccactatctgcatgtacactccgctggcaagctgcacatactcattctcctcgacgttggtagtagaatcctgcgcataaaattcgctttgagagatgaccttgatgccttcctttttgataaagtcatttataccgtctttttcctcatcaagcatttccgcataggtcttgccgtcatcacacgcctgaaaacccaagccgaatgccagtaaggataaaaagaataaagtaagtttcttcatttctgttatttagtaatttcgtacaaaaatatctgatttacccgaaagttaaaagttgcaagtagaaagttcgtatcttttaacctttacaaccgctgtttttttatcctttggcattaagcagcggtttgaatttttccaatgcaagttccagcacttttttagcctcttccaatgtaccgtaaaattctccgccggaagcatttaaatgcccgccgccgttaaagaattctgtagccagccggttgcatgggaaactgcctaccgaacgcagggatacctttatcatcggcttttccgtatcttcacgcaggaagcaggagaaaacgacatttttaatgctcaacggtatgtttacaaacccttcgctatcgccacggatataattgaaattgccttgttccttcttagtcagcgtaatcagggcggcacgatgttccggatagactttcatctgcgacagcacatgccccataagacgcagacggctttcggaataggtgttgtacactttccggtaaatctcatccttgtcgatacctttcgaaagcagctcactgattataaaataaatttcacggttattggagttgtacgtaaagccacccgtatcggtcatcataccggtatagatacattcagctccctctttggtgatgtcactgaaatatcccatgcggcaaatcaggcggaacaccagctcggaagtcgaggatatttcgggatgggaaatgatgattctgcaaaagtcttcaggattcaaatggtggtctaccaatatcttccgcgcaggagaagccaacacggcgtctgccatagcatcgatacggctgatagcgttgaaatcgaggcaacagatgacatcggcttccgctatcaatttgtcggcaaactctttataacggtcgtacagaagtatatccttgctgccgggcatccatttcaggaaatcgggaaaagcattgggaacaatgacagtcgcatccttgtcctgcgtattaagaaaatgccacaaccccagagaagagcctactgcatctccgtcgggagccacatgggcaacaataactattttatccgcacgttccagccacttggcaaagtggtctattttagattgatctattactttggtcaacatatagttactcgctattttacagtttacgttgcatatccggaacaacttcgtctcacctgcaacaaaagaaagggcaaaagtacgaaaaagtttatgatttataataatatgtgcacagaacctttttcggaaagaggaagataaggaattcccaaccggatacaatcgctgataatcctctcccgatagtattcggaaagagatgcgtcaatcactaccgtacctacttcaaacaaggaaacgagttcctgcatatctcccttataaccgtgagaaacatacagataatcaatagaaacaggcacatcggatatcttgttgccccaacggtcgtcgtacaacagacagatgcgtttccctgcataaaaaacggttttgttacggactgaaatttcaggaagcaaacaatctccctcaatcacgtcagggcgttccaggcgcaaacggctccagtaggaagaaagcgaacgttccaaccgggtgacatcgggcagcgtatcggcgcagaccagccatgaagtggagttatctgccagacaatgcactgccggacagccacggacattataaaaaacaatgctgcgccggggagcatctgtgataaacgcatacgaatgataggagacgcatagcagcagggctgacaaagcgatatatacattcgctgccgtacgcctcatccaaacacggcagaacaacaacaggcaacaataaaacaggaagacatcccatatatcgacccaaatccggtctatggaagccaaagggagctgttctatccaacggagcaaagcattctgcatccttagcggtatttctaccacatcggcaaagagctgttgcaagacaggaaaaggagtcaggacaagcaatataacagccgcatacacaatcaacgaaaccaacgggattaccaacaaattagtcaagaggaagtgtgtggaaaagcgtgaaaaataaagcattaccaacggagccgttcctatctgggcggcaacggaaacagtaaccagcccccacgccttacgcaaaaggcggttcttcaccgataacaacccgtacagcccgggttgtaacagtacaatagctgcaacagccgaaaaagacaactgaaatcccacatcaaacagccagacagggttaaacagcagcatcaggaaagccgtaacccccaatgtattcaaagtaagcttccggcaggcaggtatcagcatggaaagtaatccaaatgagcacatgacaaccgcacgtaccacggaagaagacaaccctgtaaggaaagcaaatccccacaacaagaggattacagacagaaacaaaaacggctttaaaaaccgccacctaatccacaaaggagacaggacaaacagcaacagggcggaaataaagccgatatgcagcccggaaagtgccagtacatggctggctccggcaaccgaatacgtctctacgatactctcactcagctcttctttgtctcctattgtaagcgcagagagtaccgccaattcatctccccgaaaccccatgtcccgatataaagcaaccagcctgctccgacactccaaagcctgctgacgaaaagcgagagtgctgtcgcaaccaatcgcacaccaatgtccggcacgtacgtacgctgttccgcttacccctttccgaagaagataacaggcgtaatcgaactcatccggattgccgttattggcaggtggagacaaacgggtgcacaccaacagttcatcccctcttttcaaggaatatgccgccgaatctttagggaaataaaacagaaaagtcttttctgaaaagttatataaaaatgtatctttcagcacttctccccgcaaagcaacgcgaaataaaatactgtttttcttgatttccggctttgtcgtaagagtaatccggtaagtggaagatttttccgtattcgggaatatatattcggcttgcttcaactgcacactcactaaagtccaccccaatacaaaacacgccaaaaacacgacagccccatatagcttgcaaagaacataatacttacggccaagaatatatgtccctatcaacagtagaatgacagctatccaccaaccgacggacagtatataaggatatttatccccatatactattccaccaaccaacggcatcaacagtcgcaggaaaggatgccgttgtaagttgtttgttatcaataaatattacagatttttcaaagcacggattgcttctgttgggtcgggagcagaaaatacggcattgccggcaaccaaggcatcggctcctgcatctaccagacgggagcctgtatccagattgacaccgccgtcgacctctatcagggcttccgaaccggtcactgttatcaattcgcgcaactcgcgtaccttatcaacagtatgtgctataaatttctgaccgccgaatcccggattcacccccattatcaacaccatatagacatcgttgataatatctctcagcatagataccggggtagccggattgatagtaaccgccggcaacattcccgcttcgcggatttgctgcactaccctatgcaaatgcggacatgcctcataatgcacgttcattatacgtgcccccaactcctttacttccgggatgaacttttccggctgtacaatcatcagatgcacatccaaaggcttctcggcaagctttgccacatacttcaataccggaaaaccgaaagatatgttgggaacaaacacgccgtccattatatcgacgtgtacccagtcggcttcactgccgttaatcatttcaatatcatttgccaggtatgcaaagttggcagacaatatggaaggggatattataggtttcataacagttacattctaataggttacatgaatttacaacagacaaatgtacaaaaagatttcggataaacgcttaatgcacccgacattctccggtcagtttaaatccacgcaacaactcatccgttttcaggcgtttcttgccgggaagctgcaaagcacgcacaccaatccagccgtccgtaccggctatgcggatatacgtcttgccatcggtctgcaaagttccgggagcggattcatgcagatgctctatcttctctgtttcaaaaattttcagaaccaccgctgttccgtcggactgtaccaattctgtccacgcagccggatagggagacaaaccacggataaaatcataaatccgcttgacaggctggttccagtcgatgcgacaagtatccttgaatattttgggagccggacgcaattcgcccactacagccatttcttcctgcggaacggatttcaccgtatctgcaagaatggcatccacagtctccgtaaccagacgtccgccaagcatcatcaacttatcgtgtacaatacctacattgtccgtatccgcaatcggcacacgaacctgttggatgacctctcccgtatcaatctcatgtttcaggaaaaaagttgtgatgcccgtttccgtatcaccgttaatcaccgcccagttgataggtgcagctccacgatactgcggcagcaacgaagcatgcagattgaaagttcccagacgcggcatattccaaaccacctccggcaacattctgaaagcaaccacaatctgcaaatcggcattccaggcacgcaaagcctcgacaaacgcttcatctttcaatctttccggctggagaagtggcaggtcatgctccagcgcatactgtttcaccggagagaattgcaccttatgtccacgtccagccggcttgtcgggcatcgtgattacccctactatattatatccgccttctacgaggcagcgcaagggctccaccgcaaattcaggagtccccatatatacaatccgtaaatcttctttcttcataatcatctcttttaatcttccgagaaatgtaccaatacctgacggtacgagttaaatatctttgatttggacacgaaaccgagatacttgccttctccgtccaccaccggcaggttccatgctttcgtatcgtcaaaagtgcgcatcacctgttccatgctgtccgtatcataaaggcgcgccggagcggaagtcatcagtttgcctaccgtaaaacgatgatacagttcctgccggaacatgatattgcgtatgtcgtccagcaggacaataccaatcagcttaccctcattgtccgtcaccggaaatatgttgcggtgtgaggcggagatggctttcaccaactcggcaagatccatttccggatgtaccgcaacaaagtctttctctaccacattctccactttcatcagcgtcaacaccgctttatccttatgatgtgtcagcaactcacctttctttgccagacgcatggagtaaatgctgtgcggttcaaaaacgataatcgtcagataagagctgaccgcgactatcatcaacggcaagaacaagtcgtaccctcccgtaagctcggcaatcaggaacactcccgtaagcggagcgtgcataacgccactcatcactcccgccatgcccagcaaggcaaagttcttttcaggcagataggcagtcatctcaaaatcattgctgaaatgggaaaaaacaaacccggcgatacaccccaaatacagagaaggcgcaaaaataccaccgcaaccaccaccgccattcgttgcgctcgaagcgaaaaccttaaacaggattatcaatatcaaatacagcagcagcaagtggctgtgtccgtagaagaaagagttattcatcaccgtatcccactcaacattacttgtaccgttgagcagtaattctatcgtatcgtacccttcaccgtaaagcggcgggaaaaggaatatcagaatactcaacatagcgccgcccaccagcagtttcttataaggcagtttcagtttaccgaacattccttccaccgaactcatggcacgggtaaagtagagggaaaccagtccgcagaaaatacccagcatgatcacataagggatacgctccaattcaaaagcctggtcaaggtggaacttaaacatggcttccgtacccgtcacgatataagaaacggttgccgccgtcaccgccgaaatcagtaacggaagcagcgaagacattgtaaggtctatcataagcacctccaacgtaaaaacaagtcccgctatcggagctttgaaaatacctgccacggccccggcagcgccacatcccaccaacagcatcagtgtgcggtgctccattttgaacaggctgcccaagttggagccgatggccgaaccggtaagcacaatcggcgcctctgccccgaccgaaccgccgaacccgattgttatggaactggcaataatggatgaccacgtgttatgacgtttgatacgtccctgcctgcgggatatggcatatagaattttcgtaactccatgactgatatcatcctttacgacataacgtacaaacaacccggccaaaaagattcccaccaccggatatatcagatactggtaattagcctctgttgtgtcgaaattctctgtaagaaaattttgtatccaatgtatcaacagtttcaatatcaatgcggcaaatgccgtaaagataccgaccagaaagctaagaaccaggataaaccgtttctccttgacattcttctcacgccaaatgataaagcgttgcaaccaacttctctcttctccagtcatttcctttattcacggattattttaatcactccgcctttatccaacttgataatgctggacggcttcggattactcatctcttcctgccggtagcccacgatataatccaccgctgactttacctcctcacttatttcgctgaagttcttcggcgaaggctgcccgctgatattggctgaagtagaaacaatcgccttacggaactgctggcaaagacgcttggagaaatcttcatttgtcactctgatgcccacgcttccgtcttccgccagcaaatttgccgccagattacgcgctcccgaataaataatagtcaacggtttgtctgccaggtctatcaaatcccacgccacctccggaacatcccggacatagaaatccacttttacggaagaatccaccaacaccagcatcgctttgctgtcctgacgctgctttatttcatatacacggcgcaccgcatcttcgttggtagcgtcacaaccaataccccaaatggtatcggtggggtacagaatcaccccgccttccctcattacctggcaggcttttttaatgtcttctatcatttcttactctataaatacagtgattaacacgcaaaaatagtaaattcgcaccgattacaaacaaagtttaggagaaaacaatggaagatattaaatttaaccacacactacccatacagctacgtttcaatgacgtcgataaattcggtcacgtcaacaacaccgtctatttttccttttacgatttaggcaagacggagtatttcgcttccgtatgcccgcatgtcgactggcagaaagacggcatcgtcgtagtccacatcgaagccaacttccttgcccagatttacggctccgaccacattgccgtacaaaccgtcgtgacccaaataggcacgaagagttttcatcttgcacaacgtgtcatagatatcgagacgcaggaagtaaaatgtatatgcacttccgtcatggtagcttacgacctcagcaagcacgaatccaaaccgctgacaaaagagtggatagaagctatctgcaaatacgaggggcgggatttacgaaaaaaataaagattggcaaaataactttatcgaaaacaaaactaatactttttttttctacatttgcatagttaaggaacgtataatttatgattcgattaatactgctaagcgatttcactgaatctttctcctataatctactgaaaggagtattgatgtacgcaaacagccacgaaccgtgggtggtgtgccgaatgccgctttcctataaacaaacctatggcataaagggagtgctgaagtgggcaaaaacgtggcatgcagatgctattatcggcagattcgacaacgacgacaatgtagaaattttccgtgaaaatggaatcattgccatagcacaagattacaaagcaagattcagtaatattccaaacatcactggagattattacaaaactggcaggatggcagcggaattctttctaagaaaagggtatcaaaattttgctttctatggctatcgagatacggtttggtcacaagagcgttgcgaaggtttctataaatgtatagccgaacatggttttggtaattgtttccaatcatatcaagagcaatctctcgatgatctttggttttatgaagctcctcctttactcaaatggttgcaatcgctccccctgcctacggcactctttgcttgtgatgataatcaaggtaatcgcattactgaattatgtaaagtaaataatatcagagtacccgacaagatagcaatattgggtgtggataatgacgaaattatatgtaacttatctgatcctcctttatccagcataagccacaatattgtaagaggcggatttgaggcagcagaactcatcgtacgcctactgaacgaagagaaagtcaactatcaagatgtagtactgcaacccataaatattataaacagactttcaaccgatttttattctactaccgatacgcatatccaaacagttttgaaatatatcaataagcacctgactgaacatatcaccgtatcagatctcgtaaaacaagtccccttgtcacgtaggttactagagattcgtttcaaaggagttacccaacagtccattcaaaaatacatattttctctaaaaatagaaaggtttgctcaactgctacttaccagcaatgctcctatctcaaccgtagcggaatctgtaggaataaacaatctaaaaaacttgtcacgccaattcaaggctctaaagaatatttctccctatgaatacagaaaaaggcatcaaataatgtccgactgctattaccaagctaaagactgcagttctattcattttttaggcaattagcttgtgtaattttccacgaaacatacgcaaacaagataaataaatgtaaatcatataattacatttttaacgtatctatttttgtattctcataatctgaatgaaatagcagttatagttgacaatacattaaaaaaagacgtcatgcttttcttattgtttaatggcatgaaaaaagcaaaataccggttctcaaacaaatgctccataccaggattgtacgatgaacggcaccacccggtacagagaaaaaaattctaatccggcaaaaacagcatctcggccggaatgggagtttcgggaatatctcgtcctaaaaatccgacctccagttcctgccccatataattttcaaaatacaataaatgcaatgcatgataacctttctcaagagcaaccttaccttcggcacgacgaacactatgtccaccatcattatcaactatcagcttatcatcaatataaagtttagaaccatcatccgaaatggtatagaagcgatatacgcctcttttggaaatgtaaatcaaagtacggaattcataggcaaagtgatcagcaatggcagcatcctttatcaaaaagttcttcataataccttcctttactttcaaacaagaagtaatgtcagccactcgtttacattgaccttcataataagtataagctaccccttgtttaggtgatgctacattcattgccggaaaataattcatcacccgttcctcatctgaatttaatccggagggatagtaatagatcgcctcacgacctgaaagcgtagcaatccaagtatcaaacttaaattcaccttcatacagttcaatgatacgtgcacctctaatcaattctccgtaagcatccgcaccagtcacccgaccatatccaagcaatattcttttattgataccaacataatcattatcatggtcgtgaccggcgaatacccccattacatctttcctatcaagaaacgaagcaaatataccagaattgacctttgaagaagcaactccaccttctctatcattaccaaatgtcttaccatcacctatcagttcattatattctaataaaggtatgtgaaagaatgccaatgaaggtaaaggacgtccattattacaagaagcaaaatgagcactttgtttacgataccatgctatttggtcgaaatgtatccaatcgtaaactccataaagtttgtcaggctgataatcattagagtctatacaataaagcactgattctacctttttctttgtcatcgaatcaaaaatcggtatcacacaattaccacaccccataacatctccaggccccttcgttccaacatagcatggagatttttgcaacaaatcataaatgctatccttagccatgtgctccgcatcatggttacccatagttacaacaaatggcactttggcattattaaatatttctacaaccgacatccagccattaattgcaggggcttctgtcactatgtctccagtcaatatggcaatatccggattttcggatttcagtatcgtacgaatagttctttctgtttcagcacacttcggtgaacctgatgtccaatgtaagtctgtgaactgaactattttaaactttccattttgaaaagacaattgccgttgtgcaaaaagcattgatgggataactccccataacactaacaaaagaattaatattttcttcataagaatctgattgattagtttatttctatttcatctatcgccaatctgctttgttctccttcattgaaatatccttttggacataagcccccactcaacaagtccaagcgtacaaatgtagcttccacttcaggaaatgaaagagaagcaggaaagcgagtgctttccgtcaacgtaaaatcatatgataaaactttattacctactccaaaaaagtttttcccgtctgccgaaacggaaacactcattgcctttgccggccaaatcatattccaaggacgccataaggaagcaaaagctacttgttttattctttgcgtacctttcaactccaccacaatctgtacactatcctgatagaagcttacccatctacgcatgtcttgagcatatccacaatatccgtcagtcaatccaaagctttcatccaaatgttcccactctgttttaggaacacacttataatcacatccagtggccttgttaatggcaaattctttatgagtcaccctacccatagatttgccttccttataaacggctgcgtaaataactgcatctttactcaacaatattggtgacttgtacagagaagaagaagccgttatcacagaatcattaatcgcatagtgtatctccgcatccggacaaaaagaagataaagccacttcataggtctcatgattctcattccacactcccgcataattcacttcataaaaattgcggcaagaattcacctgacaatagtccaaccgtttgaactccttatccaacctgcgagtaaaaaacacaaaatctttatattcaggttgcgtccactgcacttcggacatagccaacaaacgaggaaaagccatatattcaaatgcttcaggagtttgaatatattctccccaaatattcgcctgcgtacctattatataagactgctcttcggtagtcaatccagctggtagtgggttataaaaatatacactatccaacggaaggaaaccaccaatcgccagtggagcatattctgggctctcttgataataatctatatagcatcgtttactcggtgtcataataaccttatgcttttgacgggccgctataataccaccttcttcaccacgccacgacattacagtagcattaggagcaagcccgccttccaatatctcatcccaaccgataatatcacgccccctgctgttaacaaattgttcaatcttatgaataaaccaactttgtaaagcttcttcatctggtagtccctctttcttcatcagagtttgacaatgaatacactttttccaagctttcttaggacattcatcacctccaatatgaatgtaatgactaggaaagagttccataacttccaccaatacattttccaagaaatcaaacgtatgctccttaggacaatagacttcatcaaaaacatcaaagtaatcgcgtaccacataatcttttctcaacccacaagaaagctctggatatgacgccaatgcagcagaagcatgtcccggcatttctatctcaggaattactgttataaaacggtcagaagcatacttaacaatctctctaatttcttcttgtgtataatatcccgcttgtttttttccgtcaaaccgccgtgggtaataataatcagaatgtcctacttgagtttgactacgatgcgaccccacctctaccaacttcggatatttttttatctcaattctccaaccttgatcgtcagtcaaatgaaaatgaaatttattcaacttatagaaagccatcaaatcaagaaacttcagtacctcttctttgggaaggaaattacgaccaacatccatcaaagcaccacgataaggaaaacgaggagcatccttaatactgacaattggaatttcaatacgtccctcatacctacgatcggaagcatagatttctgccggcatcaattgcaataaagattgaacaccataaaacagtcctgctgcagtttcgttagaacaaatccgtatagcatcggaagccacctccaatgtataagcctcatcttttagagaattatcaattaacagataaatatcggccttctctgttggagaaacagctcttaatgttacctgtgtgttcttcaaaaagttctctaaataacgaaaaactttcatttcattctctccggaagacacagccacagttttctccccttgcaaaaaatactttcctcgggatagagttatatcattgggcatcggtatgataccatagttttctacagattccttgcttccgctgccacatgaaaagagagccaatgagatggcagtaaacaccccccaaatatatttcataacgtttgtaataaaaggttaggatatgtctgaactactttaaggattagctcgccaaacagcgtgtttgcccaagcaaaccaaggacgtgtgaaatcagctgcattttccgcattaaaagactcatgcataaaacctgtttcaccgtccgtatcgcgcagttgcttcaaacaactgcgtatttcttcctcatcatcagtcgtaaaagctttcattatgatactcattggccaaatatagttcaaccctacatgtggaccgcctattccttctccagcttttcctttaaaaaaataaggattattatcgctccatatcaatttacgagtattttggtaaactgcatccttgaaagaacaatatcccaaataaggagcagacaacagactgggaatattagcatcatccatacaaagcacattgccaaacccatccacttcaaaagcataaacccgcccacaaataggatggttaaacgtaccatacctgcgaattgcggcatctacttcatcagctaaagctatacattctttagcaaaatctatatgattatagactgtatgttctatttcagacaattgccgcaacgacacaacagcaaacatattggaagggatgagaaaaccaaattgagtagcatcatccgaagggcgaaacgaagaaacgatcagtccaactggcttaactggtgcaccccaaccattattgatttgcgagtctgtaggacgatcacaatcgcgcgagaaactataagtgccgattccttgtttacgctgctgttccttaaaagtacggactaccaatttcatagcctcgtgccaatctgcactaaagatagacgtatctttagtcaatgtccaatactggtaagccaatcgaatgggataacatagagaatcgatctcccacttacgttcatgcaactctttcaccatatgctgtgtatgatcagtttcccaataactacccaatggaccatcattgaaagcattagcataagggtctatcagtatacattctgtctgcctgttaataagtccggctatcaaaaactgcaaatccctatcgtctttcatcaacggcaaataaggccacacctgcgcggaagaatcacgcaaccacatagcgtcaatgtcaccagttatgataaacgtatccggacggtcgtttttcatcttatatctgacagtagtatcaagtgtattgggaaaacaattttcaaacatccaccgcagtttttcatcttttatctttggctttacttctttaatgattacctctacagctcttgatacaaaacgccttttgtctattgaaggacgcaaggaaacgaatttcgtttctgattccctgaaagcggcaaacgacaaagatggacggacggacatagcagccaaagctaatcctcccatcttcaggaaatgacgtcgtgacatattctttttcatagattatctttttaataagtgtgtttaccaggaagcacagtaattttcttctctttttcaccataaagtacgaacaattcaaagccaatattcgtatctaccgtaatgtgcggttcatcattgacagaacggcgtgcttccgcctttaaactgataataccttctggtccgaaaggataacgttctattccattggcctctgtcaggttcatgtcccaaacaatttgctgtttggagtaatctccccgaatacctattataaactctatcagttcggcaataggtggaagtcctgaccaaccgacaaattcctttctagccataaatccaggctctgccttctccggagaatagtattcccaaaatgtacccgtattcttatatacctcaagtacttcattataatggttcaaagctatttcacgggctaacttacgataacctttcttcacaagaccttgtatcaccatgtagttggtacccggccagatgccaccttgccaatagcgaccgttttccttatacttaggatggtctgccgacaaagaaggaacacggaacttgcggttaaaagtttccggattatccaattcttttaccatacggtttagttgtattgtatctaacacattggtaaatagcgcccaataagcacctatacctttggttttgcaaagagtgccatcagcatattggtcatacaaaaatccagtcttttcatcccaaagattatcatgaatatactttcccagcatcttagcttcgtcttcaaattcttctatctcttgccagcgttctaaataaaatcccatttcaagtaataaatttgcaatgaacaattgctgaagattagtatctaaccaaaccatatgtccatgactataaatagggctatatccgttcggaacccgcggcatattatccatacctgtcccccatccactcgaccaataagtaccattacgccatgtacggttaagtctcagccacttataatatgaacaaagtacgggaaaaactttatgcagacgctccatatctccaaactgatggtaataaaccatttcacaccaaggcatcaaattaggtccagtgcttaccggatcatatcgttcgaaacaatccgctccatctgctttaatttctcggcagataaaaccgtcaggatgttgtttggcataaaagttatctaacgtgcgctgaaaagggaaaaaacgtgtaccataccgtgcaaacatcagtatgaaagaagaatcccacatgaagatattaccattgtaagcagtatccaaataacttgatacaaaacccgaaccggactgtggcttacgaatatttccgactgctatttcccatgccctccaatacatttccatttcttttccatgcccatcccaaatcggattgggaagtatctgccgagcttcttcaaaactcttcggttcaataacctcgggtttggccacacgatactcgttctcggtaaccaaaggttcttttacatatgtattcttatagggcaaatgataaatttcatcattaccacaattttgagctttcaataaaggagttacagaaaaggaaagtaaacatgtaaacaagatatgtttcagcataggaaataatattttagttatagattaagcagtttctttatcttatcaaaaattgcggtattctcatatatacctgtaaactcctgtgcaccgggcccaaaagcatatacaggtaccattacaccactatgaccacctgtagaaaatttacaaacaattttaccctctttcaaatcaccatctaccaatgtaagaccaccggtttcatgatcggcggtaaccactaccagcgtttcaccatccttagccgcccattcgtaaatggcaccgatagtacggtcgaaatcatgtgtttcctgcatcaagagattaatatcattaaaatgtccataatcatccaattgcgaaccttcaatcatcatgaagaaaccattatcattttggcttaaaagttcaataccttttaacgacgcacgggcaagaaggtctccacgttcgtcaggcaacggagcatccactggataaggcactgcaaataccttgccactcttaatttttaccagttcatcccaactacgaggcgtttgaaaacctttgtcgcgcaactccttgaacaagtcacgtccgtcctcacgattctcaaagagtttagcaccaccgccaaagacatagtctacgttactgttcacataatccgccacaatttcagcctcagcatcacgatctttgttatggcaacaaaaatcagctggagtggcatcccaaaggcgacaagtaactgcaatacccgcagatttatctttgcctacagcaaagtctaccaacgacttcaaaggacggccttccacatctacgcctacgctatgataatttgttttctgtccagtagcaatggccgtcccccctgctccagaatcggtaatcagtttatttgcacagtaggttttcgaaagccccacagcctgacaattatccaaaaaaagtttaccacgattagccgtccaagcagaatatacgtgcataagactcataccatcaccaatcatcaaaacaacatttttaatcttcttcccttgtaacggtgttattttgttaacttcatagggattctccaacacataagtctgttctttatcacgacgttcttgtgcaaatatattagcagggaataatactactaacaatactataacacagcacttccttatttttttcattattatctggttttatcagttacatttacaaattatttattattcatagtacataggacaagatattcagttctaaacctaaagatgaacctcctaaaccttaaatttattattttcaacctaaagttcaaaaagtagaaaactactctacagtaaccagcaccggagcatgatccgataaaaactctgatccttctgtctcggcaagcactccgtatctcaataccttaagatcgttgcgtacaaacacatagtctatcaatggacgtttatcataaggtatctttccaaaatcgtgaaaactccatgatggtccataaacaattggagacataagccgtgtatcttgcagatgctttggattctcggcatcggtcatgtgcttgataacatccgattctggctctgcattaaaatcacctgttacaattactggtaatccgtcactcaattcgttcactctgtccaatataaggctcactccttcacgacgagccacaactcctatatggtctagatgtgtattcaatgcaaagtattcctttcctgaaatcttgtctttcaatttaccccatgaagcaatgcgttcacaagcaccatcccaccctctagaaccagcaatttcaggtgtttcgctcaaccaaaaatatccagaagcaagtaactcaaaacgcgcttttttgtaccaaagagcactatattcgccttttacctttccatcttcacgcccgacaccaatcacaccatattctggtaaacgctgcttcaggtcttctaactgattgtgaagcacttcctgtgtacccaatatatcaacatcatagaatcggatagccgttgcagcacggtcttttcggtattgccaattattcataccatcttctggattgtcatagcggatattatatgacattacattaacacgcgcctgttcagaaacttgttgtttcacttgcccgcaggatactaccccaaaagatagaaacaataaaatgatttttttcataacaatatatttaattattccacatacaaaacagaagaaggaattggtaccaacgtttcagcagaaggcaatttccaagcccaactcaaatgttctccttcataatcttcaaagtaatagagcttataggaatggaaacctttttctaaagctatgaatccggtagcaggaattgcagcatgtgaaccgtcattgttcactaccagttcattatcaatgtataatacactgccatcatctgaactagtttggaaagtatatactccattttcaggcacttttatcagtccggaaaaaatgtaaccaaaatggtctgtcctgcttgcaccttgtatagaaggtttagacaaaactccagtcctcaacaaaggtgttttttctatgtcagttactttctggtaattaccttcaaagtacttataggtcacaccattctgtacaggatgtacagaaagagcatccttcaattccgctttgagagctataatagacaagactctacttggatgataaccttccttaaatcctctcgctttcacttgagtcgtcttattcaaactgaaaggatgtttataaaggaatgactcctcggtcggttcgcttccgtccagtgtataccttattttcgcaccttgagtggttgtggccagctctacaactacacttccttggaataaattcaaatccttatcgacgtaagggatagatacaactttatctcgggtataggagtaaggcgcagtttgttcagcagtacctctgctcttatttggcttgtcagacaaggtaaaacgcaactctcctcctctcatcagacagtcataggtaataaagtttgtatctatctgtttcccatttagttccacctttgtaatataaatatttttctgcggatcattggcaagtatcgtcaaagttcttccattagccaaatgcactacaactttctcgaacaagggagtagtaagaacatattcgttgctaccaggacaaaccgaataaagtcccatacttgaaagaatataccatgccgacatctgcccgcagtcttcattgccaataataccttccggagtgggatgatacatctcgttcagcaagcgtcgcgacattttctgtgttttccaaggctcacccacataattgtacaaataagcgatgtgatgactaggctcattcccgtggacatactgccctattaaacctgtgatatctacaagattgccatgtatctctgcatccgtattgaaaatatcatcaagagcagcaacaaattcttctttaccgccaaaaagttgtatcatcccattcacatcatggggtacaaagaagcgatattgccaagctgtagcctctgtataggcacgtcccactgcaagcggattaaaaggtgattcccaattgccatccatacgctttccgcgaaagaatctcgtagcaccatcaaacacattgatgtagttttgcgaacgttcaatgtattttttataaatatcttcttttcccatttcttgggccatacgtgcaatacaccagtcatcgtacgcatattcaagcagacaagatacagattctcttttaatattagaaggaataaaaccatattttacgtaaaagtccgagccttttttgtttttatcggaggatatcatcatagcctccaaagccttctctgcgtcgaaagacctaattcccttcaaataggcatcagctataactgatactgaatgataaccaatcatcgtgcctgtttctccagcagaaagcggccaaataggaagttcccctgaagtatcatagatgtcgagaaaggagtttatcatgtgattgaccaagtcagtatctatcaacgtcatcagcggattccatgcacggaaagtatcccaaagggagaaagtggagtattggatccttcctattggcaacttacctatctgcatgtcgtggcgacgatattcaccattaacatcgttcacgatattaggtacaaccatagcgtgatacatagcagtataaaagttctccttgtcggcttcactaccaccctccacagtaatagtagatagttgttgttcccaagcacttcgagtagctgtatgtactgcatcaaaatcgaaatccttcacttcggcctccatgttttgacgcgcgttctgcacactcaccaatgacaatcccactttagcaataataggctcaccgttcgtgttatcaaatgtgaggatagcctgtaaatccgtaccggtcaacttggtattgataggcactttcttcttatttttcacaaactctacagtctgaaaggatttggaaaaacgagctacgaaataaatatattgattatctgtccatcccctggttcggcgcatacccgtaatttcgttgtctgcagttttctctaattcagcttcataaatatattcattatcaagcgaatgtgccatatctacaattacagcagcaagatttcctgtaaggtaagtgtaacgatgcatacctacatgaggggtcgccgtcaattcagcctttataccttcatctttcaacagcaccgagtaatagccagccgatgccatttcgtcttgatgggaaaagttagcaggactgtagaagaactcatttgtaaagcttggttcttgggtggtaggacgaaataatatatcacccaaatctatgcatccagttccactcagatgggtatgtgaaaaccccctcaaggtagtatcattatagtgatatccagcacaggcatcccaattgcctacacgtgtatcaggacttaactgcactgcaccaaaaggagcggtggctccaggataggtatgaccgtgaaaccctgtaccgataaaaggatccacgtaatcaacggaaaatttctcctcagagttacaagcactacatataaaaaggtacaacaagatatgtaaaatattcaatttcatcaaagcatgtatttgaaaattattcggttaacaaccacacttcattcgacaaatctaataaaaatctgcaagaaccagcatacaaagaagacaccaatccttgcagacaagaccaatggcaatgatctactttttaatcgtaaacttccaaaagagaaagattactcatagatattttgtttcaactgcccgtttgagtttataatctgattagacggatagggaaaaacaatgaagcaatccttataagaagttttgtctgtataatccgtgtaaaactcaactttatgtgtataatcaatagcatcgggttttccatctccatttgtatcgaccataccacggtttttgtaatgacgaacgagaggacgagcatttaactctttctccgccaatgccttgatttctgcattagaagaatggtgccaacgtttcaagtcgaaaagatgatcggtaaattcaaatgctaattcacaacgacgttcatgatacaactgttccattgtagctggtgatggtaaagaaagaccacaagcgcgtacatgaattctgttcaaatctttccaagccttatccggttggttcttcatcaaataagcttctgcccgaaaaagcatcatttcagcaaaacggattatcgggaagttaactcgtgcagtaggccagtcaccattagcatttacatatccttcggttgtagcattagcataaccaaaaggttccatatacttattaatttgaaaacctgattcaatgtcggacgctgaataaaactcgcattcctctccaaaaaataggaatttttgtccgtattctaaaatagaacgtttcaatcggtcattttctttaccatcaccatcttttagcatttctgcataaatgtcatatgtcggtttaatttgtccccaaccattgtagatgccccaacctttattttcaagtataacacccggaaattcagaacctcctccagtagaaccacccgtacctggaatagtccataaatattcctttccccaatattttgagaagtcagaagagaacaattcatcgaaagtgtctgccaaaccacgattatacgtcgtttccagctcatctaccaatttaataacctcatcccatttcgtttcatcccacatggcccagtaggcatatacctttacctgaaatgctatagctgctgcctgatgcgcgcgccctaagtccttatcatcataatcttcgaaacgtggcaaacgtttcttagcattttccatatcttcaataatcaatttatagttatcaataactgaagcctgctggggtggaatagagttatcatatccatttacaaaatcttcataacgtacaaaaggaactccttgtttatctgtaccatagcgataagccatcagaaaatgtgcccatcctcgagtaaaataggcttcaccaagactcctgttttctatttctgtcaatgcagtagtcttttccttatctactaattgatcaatcacccaattagaacgggaaatcactttatacatggtttcgaacacagtacgtaatggagactcatcacctgtatatttaaacgtcgcaagtgtcgggaaatcacgtgtttttccccaaactatatcattagcagcaccctgctcccaaaataattctcgaccatacatggcttcctgatgaaaacgttcgtataatccgtccacagcgtcaattgcctgctgatcatttaagaaataagcattgtctctggcatctccttcgggttgtacatcaaggaaatcactacaagaagtggcagtaagtagtgcaacgcatactactccaaataatatattctttttcataatcttcattcaatttataattagtaagtcagttttactcctaaagagaatacacgagataccggatacttcaaagcatcccaccccccgcattcagggtccataccagaatatctggtgatagttgccaaattttctccactcaaaaatacagataggcggctgttgcggtcattcaagtgtgaccacttacaaaatacgtcactcaaatcataagaaagcgttacattcttcaagcgcaggtatgaagcatcttccagataccaatctgaagctgtgctaaagtttccattgttgtcattctttgacagaataggaatgttagatcctctgttatcgggcgaccaagcgttcaagatctcacgagaacggttaaagttaccttctacatcacttaaaagcatatatttggaaacattcattgcttgtgctccacctactccttgaaacattgcactgaatgacaatttcttccaagtaaatccaagtgtccatgcaaaggtagttttaggagtagcactacccatatattgacggtcaccaaaaccaattgtaccatcaccgtcataatctacaaacttcaaatctccttttttagcatcaggttgaattctcttaccattcttatccacatatgccgctgcttcctcatcactttggaatattccagctgtctgtatcaaatgaaaagaattcaaaggttcaccttctgtggtctgataaatatctttcacactacggaaactcttatcatctgtccacactcccggagttccatcctcattcttcaccccaatgtcagaaacccaattcttcagataagaaaagttacctgttacaaagtaagaaaagtttttatttattctatcattccaacctatagacaattcaaaaccgcgatttcggacctctccaagatttaccaacatagcatccaaccccatagtagaaggccagttcatcggttgtggctgtatcaaattgaaagtacgtttatcaaaataatccattgacaaagaaagacggttattgaacatttccatatctaagcccaagtcgtactgttcagaagtctcccatgtcaaatttggatttaaagcagtactataataagcaaagttattccataattgattagaagttacaccgtattgtgcttgttctgaataagtatttttcgataatagtggtgatttataattataatcaatagaccccaaattaccgacacgtccccaagaagcacgtaatttcaaaaggtttacgatatcgttcttcttaaaaaacttctcattagaaattttccatcctaatgttacagcgggaaaatcgccaaagttatgttccttaggcaggcgtcctgcatagtcacggcgccatgaagcggttacgaaataacggtcgtcataagaatatgccaaacgagcaatcattgaaacattcgcatctggtcccgttaaataatcaagcacttcagttgaattggcataagccatgtattgcagataggctgcttcactagacaagtcctttccaatcgcttccaacccccgtttcgaataatggtcagccgtagtagagaacaaagcacctacggtatgtttaccaaatgtgttatcatacgttaatgtattctctgtcttccaagcgtccatacgataagattgctcctgaacattatttgataggttcggtttaccaacttcgtcacggataggattgaattttttataataatagttctgcaaattgtaagtaaaacgacttacaaactttaaaccaggcaacacattacctatttccaaactagtagtactccacacatcacttgtcttattgtagagattttctgcctcaagcaaacgtacagggttcacagcatcaccatgagcatcggcaaagtttgagccatacttttcaatgtaagcagggtcttctgttgttgtaccaccataagagccatccaagggattataaatagtagcactagccggcatatatacagctgataatataggaccagtgtatgcatcattatccgtttctttagaacgacttgttgtattcttccacaccaaatcttcgctgattgtaatccacttgttcaattgcatcttaccattataacgcaaagcaagatttttcttataagtattaatcaaagtaccctgatcgttatcaaaagacaatgagaggcggctggaagacttatctgtacctacatttaaagcaatattgtggcgctgataaaaagctgtacggaaaatagcatccatccaatcagtacgtgtagtacctacccacggattttttgttacattccagccatcaggtaatgcctggcctgcattttcatacgaccttctacgcatttccacttgttcttctgcattgagtggttcaattaaattagtagcctgacgaaagccgaaagttccgtcatacgtcaaagtaggagcaccttcttttgcctttttggtagtaacaagcactacaccacctgctcctgactgcgcaccataaatagcggcagaagcagcatctttcaatacaacaatactttcaatatcgttcatggaagtaataggagcccccggaacaccgtctaccacccataatacgttatcgccgttctgcgaaccctgaccgcgaatcacgatattaggagttgaagtaggatcaccaccatcagcctgaatagttacaccaggcaactgcccttgtaacatactttccgtagaagtaacaggtcgtgcagccaactcatctgtattactaattatacctacagaagctgacaagtcttgcttacgtgtattggcaccatatcccaaaacaactacctcgtccagcaattctgtgtcttctttcaacacaattgtcatttgcttctcacttacaggtatttcttgagtagtataacccacaaagctaacaaccaatacatcacttttagaagcggaaagaataaactcaccattaacgtttgtaattactccattagtagtgcctctcactagtacattagcacctattacaggctctccaatttggtctttcacaattccttttactgaaatttgctgtgagtacgcaatcacagaagtaaacaatcccaataatagaaacaaaaccattcgataaaatccaagatttacttgtttcatacattaaaaatttaaagtttataatataaatttataattccatcacaaaggtttaaaaacagaattacaatattattaaaaataaaaaaaatattactattttccagaaaatggtaatacctgtctatcccaaaagtgctgaagctcctaatagaccagcatcctgtaattgtgaagacacgattttcacatcagccacaactcgtggataaggaaaatcttttaaagtctcatacatcgcttctttaaaaagcgggaaagctgttgctattccacctcctagtactattaactgtggagaataagcaaataatacagcctttaccaattgtcctatatgcccaccgaactcctgccacaacaatagagcatcattatctcctttcaatgctttttccgactcagcagcaccagtggtattcctacgtttaaaaaatccgctactacaataatattcgtaatcagcctctaaatagggtaatgctcccaattcacctgcaccggcatatccccctccgtacaaactatgatgaataatgattcccagccctattccggtaccgatagtaatacccaccatattttcataaagtcgcccgcttccaaaaagactttctcccaaagcaaaacaattagaatcattattgacagccactggtaagccaaacttctcctccagcagctcctttaaatgcacttctttccacgaagcaatattcatcgcatcatacactataccatgaactgtatcaacgattgacggtacaccaataccaatcccctcaacagtctcacctatcataggttcaataagttcaaaaagctgcgtcaagatcacatcaacatcttgtgtagccaaacaagcaaccgaattccgtttcaaacactttccttccgccacttgtgctatccttatattagtaccacctaaatcaatggctaacctcataatttctctattctaaatatttttatattgcaaatataaatacacataagtcaacaaagtaaacaatttgcgtatttgaatcctctttttacgcaaactaattatttcctcttatgagacaatctaacaactcaagcccttcaggacgctgtacaaaatccataaaaacaataccacacatctggcttcttctttgttttagatactctgacacaaacttattcacttgtttagcaaaaacttcaggtgtgcctagcggaagtccagtagcactaacgaaagaaatcgcccatcgatatgaagaactaggttctgctgctacattatgcaaattacgcatacaagcttctatttttaatccaacttcctcatctgaagcatactgatattcatcttgaagtaagacttgtgcttccgcaccattactgcctcgaagcgtcatcaaacatgtggcatcatccttccaaccctcacaagcagttccgggatatttgttcatggctacatctcggtgtaaaaacagaatttttccacgacaatcacccaatgctaaatcctgacaaaaattccaaacaaagaaaggctttgcatcaatagccgacaaggaggtttctaccaaagaagcgtaagcctcagaacttccgccctctctctttaaagacacaatcaacatctcagaaggatgttctttcagaaattttataaaagtaggtaatacatccgtttcccaatacatattctgaaaagcatgactatgaaacactcccagctttccgtctttctcagctaaacgaatatcaaaagcacgaatgcccaattctaattgcgagaaaatacctgcatcttgagttttcaacatacaaccaccataaatagcaccactgtcatgagtaccagggatagaaagtttgcatacaggcaatgtatcagaaagaagtttcatccaatcgcctttgctgcctgcgaaagccggttttgcacaaaggaaccagctcagcataaatacaacagaaaacatgtgtacagatgttatattcatagtttcaaatattagatattacaaaagtacacaaacgccaaatgacttacagccgcaatttgcgaatataaatcctctttttgcgtaaacagaaaatgcatctaactgtttaccgccgcaaactgtttcgatatataattaagtaggaatatattcttaaaatatccgtctaatttttactccaatacaaactgcaaatgattatccgtactgagtccctcgtcaaaagtaaaaccttcccacgaaaaacctctcaaatcttcggggcatccaatgcgatttttgatgatgtgacgcaccatctcccctctgcacatcttcgcataaatgacaacggtctttaactttccgcctttccacacttgaaaatctggagtaaccacacgcacctctgactccacccgtttccagtcgaataaatccttcatctcaccacttgccaagttgaccagtataccgccccgtttcttgatttcttctatgaaacagtccgtcagcagaggtttccaataatcaaacatggtgataccgcctttctccggcaggcgcacatctccctccagacgataaggtctgataccgtccagcggacggagcaatccataaagaaaagaggtgatacggagatgttcctgtgcataacggaagtcatcagccgtaaaatcctttggcaggatgcgtttgaaaacagctcccgtatatgcaccgattgccggcatagggcgattgtcttccgaacaaaagtcatgaaaacgtgccctgttttccgcagcaattttagcattcaccttcaagagtttttccagttctgcggcagaaacctgtgacatttccaacgcattccgtacagcttccgcttcaaaatacggaacggtaacttcgggcactttcaaagaacagtgcgacgccatggtcttggcacaagagataaaagtgagcataggcatattccttatatttgaagaaagtccaaacgaactcttagacgccacaaaaataaaaggatttcaggagagaaagcgcatcattaagaatattttccatagaattcacatcggtttcaagagtttttcatacctttacagcttgttggagaaatagcgcacagcaatcggataacactaagttccccttattctccggcacttggcgatagaaaaagaaaaaataatatataaaatgactcacaaatggaattatttacccattacatccgatcaggcagaagcaagccaacgactggcccaggaattagggattagccctgtacttgggagattgctggtggagcggggaataacgacagcgacagctgccaagaagtttttccgcccgcaactaccggatttgtacgacccgttcctcatgaaagatatggacgtggccgtagaacgcctgaacaaggcaatgggaaagaaagagcgcattctgatttatggagattacgatgtagacggaaccaccgccgtggccctggtctataagtttattcaacagttctattcgaacatagattattacatacccgaccgttacaacgagggatatggcgtttcgacacaaggtgtggactatgcctccgaaaccggtgtgggactgattatcgtgctggactgcggcatcaaggccgtagatgaaattgcatacgccaaggaaaaaggcatcgacttcatcatctgcgaccaccacgtacccgatgaagtgttgccccctgccgtagctatactgaacgccaagcgcgaagacaacacctatccttacgaacatctttcgggctgcggagtaggttttaaattcatgcaggcattcgctatcagcaacggcatcgaattccaccatctgattccgctgttggacttggtggcagtcagcatcgcctcggacatcgtaccgattatgggagagaaccgcatacttgcctatcacggtttgaaacagctcaacagtaatccgagcgtagggctgaaggccattatcgatgtatgcggactgtcggaaaaagaaatcaccgtcagcgatatagtattcaagataggtccgcgtatcaacgcctccggacgtatccagaacggcaaggaagcggtagatctgctgacggaaaaggacttctcggttgctctggaaaaggccggacaaatcaaccagtataacgaaacccgcaaagaccttgacaagaccatgaccgaagaggccaatcaaatcgtagccggtctggaaggactcgcagaccgccgctccatcgtgttgtacaatgaggattggcataaaggagtaatcggaatcgtcgcttcccgcctgacggaagtatattaccgccccgccgtagtgctgacacgcacggatgatatggcaaccggatcggcacgttccgtttccggtttcgatgtatacaaagccatcgagtactgccgggatttactggaaaacttcggcggacacacctatgctgccggtctgtccatgaaagtggaaaacgtacccgctttcactgaacgtttcgaagaattcgtatcccggcatattctgccggaacagaccagcgccgtaatcgacatcaatgccgaaatcgacttccgggatatcactcccaaattctgcaatgatttgaagaagttcaaccccttcggtcccgacaataccaagcccgtattctgtacccacaacgtgtacgactacggaaccagtaaagtcgtaggacgcgaccaggagcatatcaagctggaactggtggacaacaaatcaaacaatgtaatgaacggaattgctttcgggcagagttctcacgtgcgctacatcaagaccaagcgttcgttcgacatctgttacaccattgaggaaaacacccacaaacggggagaagtacagttgcaaattgaagatataaagccgaattaagccgaagaagacgggagaagattctctttgtgtttttcctttaggcacggattacacggactttgtagactaaaaaaacagtaaagtccgtgtaatccgtacctgaaatatcatcattatatatagtatcacacactctttttatctttcaactttacaaccatgtcctcgcagcccgacgcctcccaactttcaactctcaactcccgaatcctaaagcagtattggggatatgaccgttttcggggtatccaggaagatatcatcgacagcattagcaagaataaggataccttgggactgatgcctacgggtggcggcaagtccattactttccaagtcccggcacttgccaaagaaggaatgtgcctggtgattacccccctgatagccctgatgaaagaccaggtacagaatttgaagaagcggggtatcaaggcacttgccatctactccggcatgagccggcaggacatcatcatcacccttgaaaactgtatattcggcaactataagttcctctatatctcccccgaacgtctggatacggaaatattccgcaccaaattgcggaaaatgcacatcagcatgattacggtagacgaaagccactgcatctcgcaatgggggtatgacttccgtcccgcctatctgaaaatcgcagagatacgcgaactgctgccggatgtccccgttctggcactgaccgccactgcaacccccgaagtggtaaaggatatccaagcccgtttgcatttccgtcacaagaatgtattccgcatgagcttcgagcggaacaaccttgcttatattgttcgcaaaacagagaacaagactgccgaactgttgcatatactgcgcagcatgcccggcagtgccattgtatacgtacgcaaccgccgccgcaccaaggaaattaccgaactgctgaacaacgagtacatcacagccgatttctaccatgccggactggacgatgccaccaaagacatccgccagcaccgctggcaatccggcgagagccgtgtcatggtggcaaccaatgctttcggcatgggcatagacaaaccggacgtgcgcatcgttatccacatggacctgcccgactccatagaagcctacttccaggaagccggaagagccggacgtgacgggcagaaggcgtatgccgtcatcctatatgccaagtcggacaagactacactgcacaaacgcatccccgacacctttccggagaaagaatatatcagagacgtttacgaacatctccaatactattatcaaatggcaatgggtgacggactggattgcgtacgcgaattcaacatcgaagatttctgccgcaaattcaaatacttccccgtaccggtggacagcgctttgcgaatcctgacccaggcgggctatctggagtacactgccgaacaggacagcacctcacgcatcctcttcaccatacgcagggatgaactctaccggctgcgcgaaatgggcgaagacatggacaggctcatacaagccgtgcttcgttcctataccggagtattcacagactatacctatatcaacgaagattcgcttgccatacgcacaggacttacccgccggcaaatctacgaaatgctggttcaccttgccaaactgcgcatcgtaagctatattccccataaaaagacaccttatataatatacacgcgcgaacgcgtggaagcacaacgcatccatatctccccggaagtatacgaacaccggaaagcacgctatgaaacgcgcatcaatgccatgctcgattacgtgaccaacgacaccgtatgccgcagccgtatgctgctggactacttcggggagagaaacgaacataactgcggacaatgcgatacctgtatcagcctgcgcagcaaatcaaaagcttctgaacaaccggaccgggaaacgctttgtgcaaaagtatgcgagatattgtcctgtgaatccctgactcccgccggcctgctcaaacaacttccaatggacaaagagcttctgaccgaaatattgcaccggttatcggacgaaggaaaaattattgccgttgacggaatactgcaaatcaaaaaataaatcattacttttgtacagtgcatcagcacaccaatcctatcaacctattaaaaacataactaaaacaacatcgtaatcatgggattctttaaatcgttcttctccggcaagccggcaaatccggaagaggaaaaacagaaaaacaatcagaagaacttcgagatattcaagtacgacggtatgcgtgcccaacgtatgggacgcgctgactatgccatcaaatgtttcaccgaagcccttgcgctacaagaagatttcgagacaatgggctacctggcacaagtatatatccagtccaacgaactggatgaagcccgcaagcttttggaaagaatgatccgaacagaaccggagcatacctctactttactcacccttgccaacgtctgctacatgcaggaggactatgccgccatggcggaagccgcccaaaaagccattgccgttgaagaaggcaatgccatggcgcactatctgctgggaaaagccgacaacggccagaacgacggcatcatgtgcatcgcccacctcacaaaagccatcgtactcaaggacgacttcaccgaagcccgtctgctgcgtgccgaggctctgacaaagatgcagcagtacaaagaggccatggaagacatcgacgccatactcgcccaagacccggacgatgaaaacgccatactgctccgcggaaagataaaggaagcgaccggtgcagaagccgaagcagaagccgactatcttcatataacggaactgaatccgttcaacgaacaggcattcctctacttgggacagttgtacatcgtccagaaaaagctgaccgaagccatcgctttgtttgatgaagctatcgagctgaatcccgactttgcccaagcataccacgaacgcggccgcgccaaactgctgaacggcgacaaggaaggctccatggaagacatgaaacgcggattggagcttaacccgaaagagttgcaggatttcaacggacaatacggcaatctgccgggcaacaatacgacaaatgtattaggattataaaacattatctataaaatgatgcaattatcaaaaaaaacattggtttttatttgcatctaaaagaaaagtgttacatttgccacataattcaaaacgaaaagcaagaatgaaatcatttacttatgcatattacttctttttttacttttactttagccggaaagtagagcgggagtttgtatgtatcaagtgacagtgatgcttaagaacagaatagagaactaagtaatatataaagtcccgctccagtgtatggaagcgggatttttttgtagcataaatcaagaaaaagagagtcaggaatgaagaaggtagccattcaaggaacattaggttcgtatcacgacattgccgcacacaagtacttcgaaggagaagaaatacagcttatctgctgcgccagcttcgaggacgtatttgctgctgtcaaacaggacagtcagaccataggcatgctggcaatagaaaatacgattgcaggaagcttgctgcacaacaatgaactcctgcgccaaagcggcacacagattgtaggcgaatacaaattgcgcatctcgcatagctttgtttgcctgcccgacgaggattgggacgacatcacggaagtaaactcccaccccatcgccctgatgcagtgccgtgagttcctcggacagcatccccgcatcaaggtagtggaaggcgaggacaccgctctcagtgcggaaatcatcaggaaagaaaacctgagaggacatgccgccatttgttccaaagccgccgccgaacgttacggcatgaaggtgttgcaggaaggtatcgaaaccaacaaacacaacttcacccgctttctggttgtggcagacccctggcaagtggacgagctgagccgccaccgcaacaaggaagtgaacaaggcaagcatggtattcacgttgccgcataccgagggaagcctttcgcaagtattgtccatcctgtctttctaccgcatcaacctgacaaagatacagtcactgcccatcatcgggcgcgaatgggaatatcaattctatgtagacgtagttttcgacaatgtgctgaagtataaacaatctatcgtggctatcaccccactgaccaaagaacttaaaatattgggagaatatgaagacggaaaatcaactatctaaaataaagccggccgaccggctggcaagcgtaagcgaatactatttctctaaaaagctgaaagaagtggcacagatgaacgccgaaggcaaggatgtaatcagcctgggcatcggcagtcccgacatgcctccttcggagagtaccatacagacgctttgcgatgcggcccgcaaccccgacggacatggctaccagccctatgtgggtattcccgaactgcgccgcagctttgccggctggtataaaaaatggtatggcgtagagctggacccgaatacagaaatacagccgcttatcggctccaaggaaggtatcctgcacgttacgctggctttcgtcaacccgggcgaacaggtgttggttcccaatcccggctatcccacctatacttcattgagcaggatactgggtgcagaggtcgtaaactataacctgaaagaggagaacggctggatgcccgacttcgacgaactggagaagatggatatgagccgcgtaaaactgatgtggaccaactaccccaatatgccgacaggagcgaacgccacaccggaactgtaccgaaaactggtggactttgcacgccgcaaggacattgtcatcgtcaacgacaacccgtacagctttattctgaacgaacaccctatcagtattctcagcattccgggtgcgaaagagtgctgcatcgaattcaactccatgagcaagagccacaacatgccgggctggcgcatcggtatgctcgcctctaatgcagactttgtacaatggatactgaaagtgaagagcaacatagacagcggtatgttccgtgccatgcaacttgccgcagccaatgccctggaagccggtgaggaatggtacgaaggcaataacaagaactaccgcaaccgccgccaactggcaggagagattatgcgtgagctgggatgtacttacgacgagaaccaggtaggcatgttcctttggggaaagatacccgacagttgcgccgatgtagaggaactgaccgaacgggtattgtacgaagcgcacgtattcatcactccgggattcatcttcggcagcaacggaaagagatatatccgcatctcgctttgctgcaaggacgacaaactggcggaagcgttgaaacgcatcaaaggaatgagataaatcattacagaaaaacagcttattaataaaaccgattcatccgcttaataaatctcttcaagattttactataattcttgaaaaattatagtaaaattctactcgaatttattaatagcctgaaaacccgctataggaaagggatgcagaagcgagagtaacggtttagaaatatttatacaaccgaatataattaaacaaataaagaatatggaacttgaattagaatcaatcttgttgccgggtatcgaggagaagcgtcctctggttattgccggtccatgcagtgcagagacggaagaacaagttatggacaccgccaagcaattggctgccaaaggtatgaagatattccgcgcaggcatctggaaaccccgtaccaaaccgggcggtttcgagggtgtaggcgtagaagggcttgcctggcttaaagaggtgaagaaagaaacaggcatgtatgtatccaccgaagtggccacagccaagcatgtatacgaatgcctgaaagccggaatagatatactctgggtgggtgcccgcactaccgccaatccttttgccgtacaggaaatagcagatgccctgaaaggcgtggatatcccggtcttggtaaagaaccccgtaaatccggatctggaattatggataggtgccatggagcgcatcaataatgccggattgaaacgcctgggagccattcaccgcggtttcagcagctacgacaagaagctataccgcaacctgccgcaatggcatattcccatcgaactgcgtcgccgcattccaaacctgcccatcatctgcgaccccagtcatatcggcggaaaacgcgagttggttgccccgctttgccagcaggctatggacctgggcttcaatggtctgattgtggaaagccattgcaacccggactgcgcatggagcgatgccgcccaacaggttacgccggatgtattggactacattctcaacctgctcgttatccgcaaggagacacaaagcaccgaaaacctcagcgaattgcgcaagcagattgacgaatgcgacaataaccttatccaggaactggccaaaaggatgcgtatagcccgtgaaatcggcacctacaaaaaggaacacgatatgacgattctacaaacgggacgctataacgagattctcgaaaaacgcggctcgcagggttcgctctgcggcatggattccgagtttatcaagaaagtgtttgaagcgatacacgaggagagtgtgagacaacaaatggaaataatcaataagtgataatttcgtagattgagggtagaagcaaatagtaagtggattgtagttttgacataccttcggtttttataacagtcagaaaattatgcgaatattaatactcggagccggcaaaatgggctccttcttcacagatattttaagttttcaacacgagacggccgtgttcgacgtcaatccgcaccaactgcgtttcgtctataacacctaccgtttcaccacgctggaagaaatcaaggaatttgaaccggaactggtgatcaatgccgctacggtaaaatatactctggaagctttccggcaggtgttgcctgtgcttcccaaagactgcatcatcagcgacatcgcttcggtaaagaccggactgaaaaaattctacgaagaaagcggtttccgttatgtgtcgacacatcctatgttcggccctacttttgccagtctgagcaacttgaatacagaaaatgccatcatcatcagcgagggtgaccatttgggcaaaatcttctttaaagatttataccagaccatgaagctcaatatctttgagtacaccttcgacgagcatgatgaaacggtggcctactccttgtccattccgtttgtttcgactttcgtgtttgcagcagtcatgaaacatcaggaagctccgggaactacattcaagaaacacatggccattgccaaaggcctgttgagcgaggacgattatctgttacaggagattctgttcaatccccgcaccccctcacaagtagagaatatacgtctggaactgaaacaactactggagattatcaccaacaaagatgcggaaggaatgaagaagtatctgacgaagatcagagaaaaaattaagtaattagtgattaggggttagtgattagtgattagtaccatgcggcataatagcgcagcctgctaatcactaacccctaatcgctaatcactaacccctattttttttgcagaggctgattttatgtgtaactttgtgctcgaatcatgatagaccaacccaccatagacagaattctggatgcggcacaaatcgttgatgtcgtgtcagacttcgtcacgctgcggaaacgcggagtgaactatgtaggtctgtgcccgttccacgacgataagaccccgtcgttctacgtatcgccagccaagggactgtgcaaatgctttgcctgcggtaagggcggcaatgtagtgcattttatcatggagcacgaacagatgtcctaccctgaggcactgaaataccttgccaagaaatacggcatcgaggtcaaggaacgggagctgtccaatgaagaaaagctcgttcagagcgaacgcgaaagccttttcatcgtcaatcagtttgcccgcgactatttccagaatatcctgcataaccatgtagacggacgcagcatcggtatggcttatttccgtaaccgcggattccgggatgacatcatcgaaaaattccagttgggatactgtaccgaaagccataatgccatggcggaagaagccttgaagaaaggatataagagagaatttctcgtcaagaccggactctgctacgaaacggacgaccaccaactgcgcgaccgtttttggggacgcgtaatctttcccgtacataccttatcgggtaaagtggtggctttcggcggccgtgtacttgccagtgccacaaaaggagtcaaggtgaagtatgtcaactctcccgaatcggcaatctatcataaaagcaacgaactgtacggtatctatttcgccaagcaggctattgtgaagcaagaccgttgcttcctggtggaaggctatacggacgtcatatccatgcaccagtccggtatagaaaatgtggtggcctcttcgggcactgcgctgacaccggggcaaatccgtctgattcaccgcttcaccaacaacatgaccgtattgtacgacggggatgcagccggtatcaaggcttctatccggggtatcgacatgctgctggaagaaggcatgaacattaaagtgtgtctcctgcccgacggagacgacccggactcttttgcccgcaaacataactcgaccgagttccagcaattcatacaggagcatgaaacagactttatccgtttcaaaaccaacctgctgctggaagatgcaggcaaagacccgattaaacgtgccgaactaatcggtaatcttgtacaaagcatctcggtcatccccgaagcgattgtgcgcgatgtgtacatcaaagaatgcgcccagctattgcgggtggaagacaaactgttggtttccgaagttgccaaacggcgtgagatgcaggctgaaaagcgtgccgaacaggcagaacgggaacgtagaaacgccggcagacaggcagaaagcacacagaatgtaacaggtgccgaaagttcgactcccgctgccccgacaacggcagacgcaaccccaactgccgtcggagaagctcccgggcacaatgcggatgcaccgttcccgccggaagacagctatatatcctttattccgcaagaaggaaaagaagggcaggaattctataaatacgaacggctgattcttcaaatgattgtgcgctatggcgaaaaagtgatgtgcaatgtaaccaatgaagaagggcaggaaataccggtgagcgtaattgaatatgtcgtcagcgacctgaagcaagatgagttgtcattccacaacccgctgcaccgccaaatactgaccgaagccgccgcgcatatccatgacgccggatttacagccgaacgttattttctggcttatccggaccctgccatcagcaaactgagcgtggaacttatcagcaaccgttaccagctgagcaaataccattcaaaaagccagaagatagtaaccgatgaagaacgtctttacgagctggttccggcattaatgataaacttcaagtatgccattgtcagcgaagagctaaagcacatgatgtctgccctgcaagaccctgccatcgccaacgacgaagagaaatgcaacgccatcatgaaacgctacagcgaaatgcgcgaagtgcagagtattatggcaaaacggttgggagaccgggtggtgctcccctgacattaagaagtgtggcggatgaggttcataaactcttcacgcgtcttagcctgattgaaagcccccgtaaagtcggaagtggtggttattgaattctgcttctccacgccgcgcatctgcatgcacatgtgtttcgcctctaccacgaccatcacgcctaaaggattcaacgtttcctgaatacactcctttatttggagcgtcatacgttcctgtacttgcaagcggtgagagaaaatatccaccacacgggcaatcttgctcaaacctgtaatgtagccgttgggaatataagccacgtgcgccttgccgtagaaaggcagcatatggtgttcacagagagaaaagaaatcaatgtctttcacaatcaccatctgattataatcttccttgaacttggcggagcggagtacttcgtgcgggtccatagagtaccccttagtcagtgccagcatggctttggctacccgttccggtgttttcagcaacccttcacgctcagggtcttcacctaacaaagtcaatatatgatgataatgttctttcagttcgtccaatgaaggagatacgatttcttcttttcctaacatgagaaagtgagggggataattatgagttatgaattaaagggggatatttatctgatctttcacgatagacacttccttgaaagcaccggtggcacgcagttggcgcatcatggcatccgcttcctcgatgctgcggaagtcgcctgcacggcacaaccagcggggcgggttgaaagatgtataaacgggaaggtcaggaaaacgctcttttatattggaagccaccgaataggcttcattcttggcctgacgggtgttattaccggcatatacctgtacgcgatagcccgaacttttaatcactttccggtcgtccgaaccggtagggatatactccgaacctatcagtgccccgatacgggcatcctgatgaatggacactttaccctgccccggcacattacgttctagactctttacgatgttattctgcgccacagatatagcggcaaaggcaaaacatgcaattaaaagcaaaccgagtttcttcataaaagagtgttttatacagttttaaaaacaagctttaaacatgaagagtcggaagttggccttcctttggatacggcaacttccggctctctgttattaattaaaagcgtcgatgatacccttgaagtcagcaaccttcaaagcagcaccaccaatcagaccaccgtctacatcaggatttgcaaacagttcctttgcattggaaggcttgcagctaccaccgtaaaggatagagcagttttcagcgatttccttgccatacttctcggcaacggcagaacggatgaaagcatggatttcctgtgcctgtgccggagtagcagtcttgcctgtaccgatggcccaaaccggttcgtaagccaggataatcttggagaaatcttcggcagacagagagaatacagatgccaactgagcggcaaccacttcattctgcttgttagcttcacgttcttccagcacttcaccgatacagaaaatcggagtcagaccgttggccaaagccaattttactttttcttccaggatttccactgtttcaccgtagtaagcacgacgttccgagtgaccgaggattacatacttggcaccggtagaagcaaccatagcggctgatacctcacctgtatatgcaccagattccttatctgcacagttttctgcacctacaccgattttggcagcatctaccagcggagtaacagatgccaggtgaataaacggagtacagatgattacatcacaattaggcttttcgttagccaacgcttcattcagttcttttgcaagagcaataccctcctgaagggttttgttcattttccagtttcctgcaacaatgttttttctcattttgttttaattattaaaagggttaatatatctgctattcaaagatttacaatttgtcattttcccgattgtccgaggattgggcggcttgctgctccctgctttttctttctctccgcttgattatcagaatatcaatgccgacaaccagcgtcaaaggtacgataaaccacaataatacgtagccaatggtgtgcaatttattttcctgtttctgctgtcccaactttaatttatccagactatcgttcagtacatattcatcgggaagttggttatcgctccatttattcaggattgtaccgtcttttatcagcagcaggccgggattggaacggataatcgttttcagggtaatatcatccatctggcagaacgggtattccgcaccggttctttcacgccacatctcaatttcttcatccggcgaggaagtcagcgcataaaaaccgtagccgtgctccacactgtaatcatagatttcattgataaggtcgatattgctatcgtccgcttcctctatccggtgggctaccaataaaaaggtatatcctttgtcggtcagtacactgtcggttatatcttcacccgtgcccaggcttatcatggagaaatcatgaatgggtggttcatagcctttttctttcaaaacggtacgcgtttcgacaaaagtccatgtgctgtccggataattatccaatgtaaactcctgttgcctgccgtctttctccaatacaaagcggctctcgaatacactcggtttcgcaccttcgggaatctccatgcccgcctttatatccgctccgatcttataagggcggaagtccagtaccggcagatattccaagcaataaaaagaaagtgcaaagacaaacaaaagcgtgtataaggacaccatccattctatcttcagcgtaacgaagcggaacatgagtttccgctcccggaataccgctatcgccgcaatcagcaatacgatattcttcccgaatgtctgccagttcgtcaacacccaggcatcgccaaagcatccgcaatcggatacgggatttgccaaagcaagatacaaggtcaacggagtcattacgctcatcaggagaagcgccaaggtcgacgcaatcttccggcgtacaccgaaaaagaggaaaactcctacacagaactctgcagatgacagaatgatggcaaaaagtaacggcaggtatgtaggaaaccatgaaattatgccgaatgccgccagataatcctgaatcttataaaatgaaccgagcggatcgacagccttcacaaatccggagaagataaacaacgttgccagcaaaaaacggcaggtatttacccagacgagctttataatatgttttttctcagtctccaaactctatctttatcaaaccaaatacggaataattaatcatgtccatatagttggcatcgacaccttccgaaaccagtgtctggccggacagactttcaatttgctttgtacggtatatcttcatcaatatcaagtccgtatacgaactgatacgcatactgcgccaagcctcatcgtaatcgtggttcttggcaagcatcaattccagcgactctttcgcatatttatcatacaggaccattgcctcttcgttcgtcatatccgcagattcggcatatcccaactccagttgtatcaaaccgataataccgtagttgacaatcgcaatgaactccgaacggataccttcgtccaccaaagtcacgcctttagtctcaatgctccgaatacgattggccttaatgaatatctggtcggttacggaagccggacgaagaatgcgccatgcaggaccgtaatcatgaagtttcttggagaacaggtcacggcaaatggcgatgacatgctcaaattgttgcttggtatctttcatatccttacaaataggctgcaaatttaggaataattaaagagaaaagaaaagagggcactctaaattatattaaagtgccctctcctatagagattgtttacgtttagagagtatttccgttttatgagcaacgcaatacctgtcccgggcggagaattgttctccgggtaatgcggttcagcttacaaagcttgtcgatgcttgtaccctgacgggatgcaatcttggataaggtatcgcctttcttcaccttatagaacagaccttcacccgatgccatactgcgagccgtaccggaagtgcctttggtcttacggaacgtataagaatcggcaacaatatcctgcttttcaaaatcgaacatcaatgcagggttaataggaattcccaggaaacgagtttcaaagtggaggtgagagccggtagaacgtccggtattaccgcccagtgcaataggttcaccggcctttaccaactggtttatatcaaccaattgcttggacaaatgcccatagaccgtttccaaaccgttatcatgacggataacgacatatttaccatatccgcgacggccctgattcttaacgatacgtaccttaccgtcaaacgcggcacgaattgtatcgcctacatatactttaatatccaaaccgtaatgcgctcttcttctgcgagggcgatagccgaatacgtcagtgatacgggtatgttcagtaggcatgcaaaagcctttcaaatcaaaagtataactttccggcacgatagcattgccataagcctgcacaaattcattgttccagctcggatacaaatccaaccccggatacaaagactgttccgcacggatttgtttctgcaaagccaatgaatctacgcttttaagttttctgtcaatgggagcttggcgggcaatcaggtcctgcgagaaagagttcaggctgaccattgccgttgctgctaataaagccgttctaatccaattaaaattcattccgtttcgtcattcatttcggtatccgcagagcatatccggtgaatcaaccgcaccctgttttacgcgaatatccagattattttcaaaaattcttccaaaggtaacatttctctctgaaaaggcgtttgtgtcgttaactatttttttgaagccacaaaagtaaaagccacgaataatagctaataaataactaacaacaagccaattacatcacaaacatgtttaacaacataaacacacaaataaagcgtatgtttaaccgtttttcagcttatggccgcccaattaacgtttgcctttcgcaaggatttcaactgtcgccacaatatttcattttcaggaagggaaccattcgggtccttatcgacaatggtctgggctacttcacggacatattgcagaagttgtccgtcgcgggctatatccgctattttcaaatcaaaagcaatgccgctttgctgggttccttccaaatcacccggcccgcgaagtttcaaatcagcttcggctatctcgaaaccatcgttcgtgcgtaccataatctccagacgtttccgggtatcttccgccaatttataaccggtcaccagaatacaataagactggtcggctccgcgccctacacgaccacggagctgatgaagctgggaaagtccgaaacgttcggcattctctattatcatcacggaagcgttaggtacattcacaccgacttcaataaccgtggtggcaaccattatctgcgcctcgccggaaacgaacaactgcatttgcgcatccttttcggcaggtttcattttcccgtgcaccttgcaaaccctacaatcgggaaactcctcacagatatgcagatagccttcttccaggttcttgaggtcaatcttttcgctctccttgattaaaggataaacgatataaacctgacgtccttcgtcaatctgtttgcgcacggaacgatacaggcttacgcgatggctgtcgaactgatgaatggtggcaatcggctttcttcccggcggaagctcatcaatgaccgatacatccagatcgccataaagcgtcattgccagagtccgcggtatgggagtcgcggtcatgaccaaaatatgaggcggctgtacgctttttgtccacaaacgggcacgctgggccacgccgaaacggtgctgctcgtcaatgacaaccagtcccaatgatgcaaagttcacggtatcttcaatgacggcgtgcgtaccgataagtatctgtacatctcctgtcagcaggccggaaagaatggtctccctccgtttgcctttgattgaaccggtcaacagttcaacccgtacatccattccgtacaatagttcacgaatcgtttcgtaatgttggtttgccaatatttcggtaggcgccatcatacatgcctgataaccgttatcaagcgcaatcagcatactcatcaacgcaaccaatgtctttccgctccccacatctccctgcaaaagacggttcatctgcctgcctgcacccaagtcccggcgtatctccttcaacacgcgtttctgagcgttcgtcaactcaaaaggaagattgcgggaataaaagccgttgaatatatcccccactttctcaaaaacatacccccagtatttgcgctgcctgtctttggcataacgcagtatgttcaactggacatagaacagttcctcgaatttcaggcggtactccgcttttcgcagcacatccggaccggatgggaaatggatattcatcaaagcatccgtcagcggcatcagatggtgctctgccagcagggcgggagaaagcgtttcgggcagaggttcgttcaactgcccgacgaggcttttcatcatcttctcgatggcgtgcgagttgagcgagcttcgcttcatcttctccgtcgtattgtaatagggctgcaaccccatggcagagagcttcagttcggaagccgggtctatgtccggatgcgcaatgtttatcctgccgttaaacaccgtaggtttgccaaatacgatatattcctgatgaaccttgtactttcctatcagatatttgatgccttgaaaccaaatcaggtcgactatccccgtaccgtccgaaaagtgagctatcagccgccgttgccgtccttcacccgccgtttcaaagcctaagatttcacctttcaactggatataaggcatcgcaccgtctatttcacggatgcgatagatgcggctgcggtctacgtatttataaggaaaataatacaataaatcatggaaagaaaagatgcccaattccttattgagcaccgaagcacgctgcggcccgacgcccgacagatattttatgtcacgcgtagttaaatcgaacatgagtccaaaagggcggcagctattttcaaatcaaaaggagtggttatctttatgttttcccggttaccttccgtcagataaacgggcttgcccaatgcctcgaccaccgaggcatcatccgtaaaatgcgaagtataaggctgctcataagcctgtttcagcaaatccgcatcaaacacctgcggagtctgtaccagcttgtatgcgtcgcggctgacagtttcacttccttcgccaaccaaatgacgcaccgtctccaccacatccgtcacaggaatcaccgcctgcttcccggcagccagggagtaacaacgggctataacctcctgagccacaaaagggcgtaccccgtcatgcactccgaccaaacccggtgttgtaacaaatgccagtccgttcttcaccgaatggaagcgtgtttctccgccgtctgcgatttgatgagggattgaaaaaccatgtttccggcacaactcattccagtaagcctgctggttgcatggaagcaccaatattatccgtatctccgggctatacgcataaaaggcctctatggtacgcatcaatacaggttttccccctatcggaagaaattgtttgggaagttcgcatcccatgcgcaaacctttaccgccggctacaatcagaacatacttcattggattcacacagcctcttcattatttacaatcagacaatcatcgcctctttcaattcggcaactttatccttgccctgcagcaattctaccaccgccaaagcaaactccatggcagcgcccggaccttttcctgtaatgacattgccgtctttttccaccatcgctccagtgcagtcggcaccctccagatattgttcaaaacccggatagcaagtagctttcttacctttcaacagtcccagtttgccgagcaccataggagcggcgcaaatggctgcaatcggtttgttttcttcggcaaagcgtaaaatcagtctacgcaagtcatcgcacttctccaaagtggccgcacccggcataccgcccggaagcaatatcaaatcagcgtcgaaaaagtcacagttcacgatattcttgtcacaaagcaccggtacgccatgagcgcccttcacaatctcgtcaggagtaaccgtaatcatttccacattcaaccccgcacgtctcattacatcgaccgaagtgaaagcctctatttcttcaaaaccgtctgcaaaaaacacataaactgtacccataatagtttctcctcttattttagattaaaataatatgtaatcgttcccgtctggttactcaatccgcttaccgtattgaacctcgctttcttcgccgcgtcttcggcagctttccgcaaggcggggtttacggtattcgtctggcggttgatgctggtgccgataacctgcccggctggatttacggtaatggtaaccaccacttttccctcatcctgcacattatatacgggacgcggcaatccgccctcgcctatggagcgtccgccaaggttaaaggtcccgtatccgccggtcccggcagttgccccttccgaagagtttcccgtaggactcccctgcacaccggttccttccgtagcacctttgctgcccatttgcgcacctttgccgaaagctcccgctacacgtttgcgggcagcttcttcggctgccttccgttcacgctccgctttttccgcagccagcttacgcgcctcttcggctttctcggcagcgctcttttcgggtttcttcacctctttcttcttttcttccaccttaggctttatggcaacggtttcttcatcttcctgcgtcagcatctcctgctccgcctcttccggcatttccggagcggcctcttccggcatcgtctccacttcaaccaaagaagggtcggcagccccccacgcatcgggtgtttctcccatcatcacgggcacaccgccttcctccgactgttcgggcaaggtaaatcccaccagtatcaaaagggcaatgacaacaacgtgcaccaacagcgcacctgccaatcctatatattttcctttcttcttccgattcaccgttccgatttacgatttagctatttacggttaacaccgtttacttattctcaggcgggcgtgtagccagcaccattttgaaatgattttcattagcgatattcagcaccttcacaatttcccgataggggacggactcatcggcatacaatgccacatacatttcgggctctttcgctgcgcacgattgcagaaaaggagtcagctcgtccaaagccagcgcctgttccttatcattaccgaaagcggcgtaatagttcaagtccttatcaatgataacccttgtcagcggcttggcagatgtctgctgttttccctgcggaagcaataccttgattgcattcggtgatactaccgtagaagtaatcataaagaaaatcaacagcaggaatataacatccgtcatggacgccatactgaaattgggtgatatttttgctctacgttgtaacacggtcgttgtttctgatttatgaattatgatttatttggcaggctcgttcagcaagtccatgaaagccattgtcttggcttccattttatttaccacaccgtccaccagcgtcaccaggtaattgtaggcgaacatggcgatgatgcccacaatcagaccgcctaccgtagtaatcatagcctcgtatataccgccggaaagcagggtgatgtcgatattattaccggcattcgccatttcaaagaaagcacgcaccataccggtcaccgtacccaggaaaccaatcatcggagcgccgcccgaaatggtagccatgatggtcagccccttttccagtttcgccacttcgatgttgccgacattctctatggctgcctgcacatcattcaccgggcgtcccaaccggctgatacctttctctatcatccgtgccgaaggcgtatccacactgcggcaataggcaatggcggccttaatctcaccacccagaatataatccttgatcttatccataaacatagggtcttccttgcccgccttacggataacgtaattgcgctcgaacagaatatagaagcacactacggagagtactccgagcactaccataatccaaccacccttgacagccatgctccacagattcatttcatcgggagcggcaatgggagtaagtaccggattggcgccggcaacagaatcggccaacgccggagccacttgggccaataacaacataagattcatcagcggagacagtttttatattcctgaatggtacgttccaatcccagatacaaagcatcgctaatcagcgcatgaccgatagagacctcatccagccagggtatgtttttatagaaataattcagattttccagactcaggtcatggcctgcattcagtcccagtcccaggctgcgtgccgttctggctgcttccacaaaaggagctaccgcagcttccggatttttagggaatgccgtagcatagggctcggtatagagttccacccggtcggcaccggctttggcggcatactctatcatctctgcatcggtagacacgaataccgacgtacggataccggcggtattgaacgcttccagcacttcggtcagaaactccagattggctttcgtgtcccagccggagttggaagtcaactgagtggggctatccggaaccaacgttacctgatgcggtttcactttcagtaccaagtcgataaattcgggtgcgggatatccctctatattaaactccgtgcgcaacagcggacgcaggtcgtaaacatcgctcttacggatatgtctttcatcgggacgcggatgcaccgttataccgtcggctccaaaactctcgcaatccaacgccacttttacaacattaggcacatttcctccacgtgcgttacgcaatgtcgctactttattaatatttacacttaatctagtcataattcggcttatagtttggggcaaaagtacaaataatagcaatatgttggcagcattctgagaaaaaaactatttttgcatcttacaaaaacagaaaacaattatgaaatttgccatattcggaaatacctaccaggcgaaaaagtcatcgcatgccgaaaatcttttccgcctgctggctcagcatcaggcacaactctgtgtctgccgcgagttctataatttcctgacttccgacctacacctcaacattccgcccgccgaattgttcgacggtgacgacttccgcgccgatatggttatcagcatcggcggtgacggcacgtttttgaaagccgccagccgtgtaggcaagaaaaacattcctattctgggcatcaatacgggacgcctcggctttctggccgacatatcgcccgaagaaatggaagaaacgattgacgaaatctacaacaaccactataaagtagaggaacgcagcgtattacagttgaagtgcgatgatgaaaaactgatggaatatccgtacgccctcaatgaaatagccgtactgaaacgtgacagttcgtccatgataagcatccataccgccatcaacggagcacacctcaccacttatcaggccgacggactggtcattgccacccctaccggttccaccgcctattcgctaagtgtgggcggcccggtcatcgtatctcacagcaagaccatcgccatcacccccgttgcccctcacagcctgaatgtacgtcccattgtcatctgcgacgactgggaaatcacgctcgatgtggaaagccgcagccacaacttcctcgtagccgtcgacggacgaagcgaatcgtgcaaggagactacgcggctcactatttcacgtgcggactattccataaaggtagtgaaacgattcaatcacatctttttcgatacgttgcggaataagatgatgtggggagcagatgtgagataactcccacgagggtatgtccaaagatagtaaaaacgcaaaagccccgcgactttccctttccggcaaaagtcagcgaggctttacttattatattccaggtcgtctcccgattagagagcgcctacttctttcagagcagcatttgtcttgtgaacggcagcggcgctggcagcgaatttagctttttcgtcagcgttcagttccagttcaacaatcttttcgataccgttcttgccaaggataacgggaacaccgatgcagatatccgattctccgtattcaccttccagatataccgagcaaggaatcatcttcttctggttgtggatgatggattcaaccacataagcacctgccgcacccggagcataccatgcagaagtacccagcaacttagtcagcgtagcgccgcctaccatagtggaagcaactacttcatccagtttttccgcgctcaacagcgtgcttaccggctggcctttgtacgtagccagacgagccagaggaatcatggtagtatcaccgtgaccgccgataaccataccttctacttcgttggcattgcagcccaaagcctgagacaggaagtatttgaaacgagagctgtccaaagcgccgcccataccgatgatacggttcttggggatacccagagatttcaaagacagataagtcatagtgtccatcgggttggagataaccacgaggatagcgttgggagaatatttcagaatgttctgcgcaaccgacttaacgatgcctgcattcacaccaatcaactcttcgcgggtcatacccggcttacggggaataccggaagtgattaccacaacatcggagttagctgtcttctcataatcgttggtacaacctacaacagtggtatcgaagcccaacagttgagcagtctgcatcatatccattgctttaccctctgaaacgccttctttaacatccagcattaccacttcgtcagccacttcattaaaggctaacacattagcgcatgtagcacctacgttacctgcacctactacggttacttttgacataatttctaaagtttttgtttattagtgttctataaagttgctacaaaaatacaacgacattcctgattaaagaaatatttccgtaataattttagttaaatgaagaatttgattggggttagtgatcagtgattggtgattaatgattatttttgcggcgatttacgattatagcgggaagcatccgtctgtcaatcaccaatcattaaccactaaacactatcaaaatggccaacaagaaaaatacgcttcaggttgttgtcggaagcattctgatactattattaataggtgttaccgtattgctgatttcagaaaaacgcgccaacaacgagttggtgcaggaattcaacctggaaaaggaagacctggaaaaccagtacaccgacttcgccaagcagtacgatgaattgaagctcaccgtatccaacgactccctttccgtccttctggagcaggaacaactgaaaacgcagcgtctgctggaagagctccgtaccgtaaaaagtaccaatgccaccgaaatacgccgattgaagaaagaactggcaaccctgcgtaaagtaatgataggctatatcaaccagatagactccctgagccgcctcactacccaccagaaagaggtgatagccgacgttacccgcaaatacaatgtcgcttcgcaacaaatcagcagccttgccgaagaaaagaaaaacctgaataagaaagtgacgcttgccgcccagctcgatgcaacgaacatcaacatctttgccgccaacaagcggggcaagaaagccaaaaaggtaaaagacgtcgtcaagctgaaaatcaactttacaattgtcaagaacataactgccgaaacaggcgaacgcaccctctacgtccgtatcaccaaaccggacaacggcgtattgagcaaaagcgattccaatacattcccctatgaaaaccgcgaactggtatattccatcaagaaatatatagaatataacggcgaggaacagaacgtaacggtgtattgggatgtcgaagagttcctgtacgcaggaagctaccgtgtagacatattctcggacggaacgcttatcggttcacagtcgttcaatctggattgattcggatgattcggattaattcggacagaagaacaaaagaacaaatttgaggtgtgtcaaaactaaaatttgttcttttgttcttctgtctgaaaaagattgttttctgtttcttccctcccttaaatcaaaaaatccgcaatttattttgtaatatcattgaaaccctatacatttgcatcgttgtttatgcaattattgttgcttcataaaacaatatttccacaacatttacaatgtatagatacaatgaaaaagttcttctgtttcatctacttgacctgcctgatgctgccaacgagcgcgcagggcatcctgagcctggatagttgccgtgcactggccgtagccaacaataaggagctgctgataagccgcgagaaaatcaatgcggcgcactaccgtaaaaaagaagcatttacaaactatctgcccaagatttccgctaccggcggatatatgcgcaaccagaaagagttttccttattgaacgatgcacagaaaggtgcactcggcagtgtaggaacgcaggtaagcggcgcgctgcaaaacggaatccagggaatgatgacccaatacccgcaactggcacagaacccgcaattcatggcacttgtgcaatcattgggcaatatagacattgccaccccgctcaacggattgggacaatcgctcgtagatgctttccgcaccgacacacgcaatatgtatgccggagcgctgacgctgacccaacctctctatatgggcggtaagatacgcgcctacaacaaaataaccagatatgccgaagaactggcacgccagcagcacaacagcggaatgcaggaagtaattctgagcaccgaccaggcatactggcaagtggtgtctctcgccaacaagaagaaactggcggaaggctatctcgaactcctgcaaaaactggaaagcgacatagacaagatgattgccgaaggagtggcgaccaaagcggacggactgtcggtaaaagtcaaagtgaacgaagccgaaatgacactgacaaaagtaaacgacggtttaagcctttccagaatgttgctatgccaactatgcggattagacctttccactcccgtcactctggcagacgagcaggaagacgacctgctccccaccccggccgacagcggcagcatcgacatgaatagtgtatatgccacacggccggaagtgcgcagcctggaactcgccgcacaaatctataagcagaaagtgaacgtgacccgttcggaattcctgccgtccgtagcgctcatcggaaactatatggcaaccaatccgtccgtattcaacagcttcgaaaacaagttcaagggcatgtggaacgtaggcgtcatggtcagcatacctgtctggcattggggagaaggcatctacaaggtaaaagccgccaagtccgaagcacgcatcagccggtaccaactggacgatgccaaagaaaagatagaactgcaggtcagccaatcggttttcaaggtaaacgaagcggccaagaaacttatcatggcggagaagaacctggaaaaggctgatgagaacctgcgctatgccactctcggattcgaggaaggggttatcccggcaagcaatgtattggaagcccacaccgcctggttgtccgcccaatcggaaaagatagatgcacagatagacgtgaagctgacggaaatctatctgaagaaagcaacgggaagtctgaatatcgagaattaaaaactgaaatcataaattacaataatggatacaaaatcacaaaacagtaacatgttgctggcattcctcaccctgacgggagtaatcgccatcgttgccctcgtaggtttcttcatgctgcgcaaagggccggaaatcatacaagggcaggccgaagtaacagagtatcgcgtatcgagcaaagtaccgggacgtatcctggagttccgggtgaaagagggacagagcgtgcaggcaggagatacgcttgccattctcgaagccccggatgtgcaggcaaaactggaacaggcccgtgctgccgaagccgccgcacaagcccaaaacgaaaaagccttgaaaggcgcccgccaggaacagatacaggcagcctacgaaatatggcaaaaagcccgggcaggacttgccattgccgaaaaatcgtacaaacgcgtaaagaacctgcacgaccagggagtgatgtccgcccagaagctggacgaagttaccgcccagcgcgatgccgcacaagccactgaaaaagccgcacaagcccagtacactatggcgaagaacggcgcggaacgcgaggacaaggctgccgcagccgccctggtagagcgtgcgaaaggcgctgttgccgaagtggaatcatacatcagggaaacctgcctgatagcgcagacagccggagaggtttccgaaatattccccaaaacaggcgaactggtaggcacaggcgcccccatcatgaacattgccgttatggacgatatgtgggtcactttcaacgtgcgcgaggatttattgcagggactgggcatgggaaccgaatttgaagctttcatccccgccctcgacaggaacatccgtctgaaagtatactacctgaaagacctcggcacatacgccgcctggaaagctaccaaaacaaccggacaattcgacttaaagacatttgaagtcaaggcatctccactggagaaggcagaaggcctgcgtccgggtatgagcgtgatattgaataagtgataagattgcataaggttgtaaaacaataaggtgacagagtgataatggagaagaagaacaacaaatacacggccctgctgaatgtgatgaaacgcgagttgcgacggctcgtttcgcgcccgctatacctgttctgcatggtcatagcacctctgttctgctatatattcttcacaacgctaatggattccggcttgcctaccgacatgcccgtcggcgtggtggaccgggacatgaccgccacttcacgccaattggtgcgcaacctggatgcttttgagcaaaccgccgtcgtagcccgctatcccgatatttccgatgcacgcatcgccatgcagaaaggagaaatttacggcttctactacatccccgaaggaacagccgccaaagcacaggcacaacggcagcctaaagtatccttctacaccaacaatacgttgctcatagccggttcactgctctttaaagacatgaagatgatgagcgaactggcatcgggagccgccgcacgcaccgcactatacgccaaaggcgcaacggaagagcaggcaatggcattcctgcaaccgattgtcatcgacacccatccgctgaacaatccgtggctgaactactccgtatacctgtgcaacacttttgctccgggcgtactgatgctgcttatctttatgataaccgtctactccatcggggtggaaatcaaggaccgtaccgcccgcgaatggttgcgcacgggcaacggttccatctggatatcccttgccggaaagctgctgccacatacagccgtattcttccttatgggaatcttatacaacacatacctgtacggtttcctgcatttcccctgcaacagcgggatactgccgatgctgctcgccacgctctgcctggtgctggcatcgcaaggcatgggcatactgatgataggtactctgcccaccctgcgtctgggactcagctttgcttccctatggggcgtactgtcgttctccatgtgcggactgtcatttcccgccatggcgatgcatcccgtactgcaaggcctggcaaacctgtttcccctgcgccattacttccttatctacgcagaccaggccctgaacggctatcccatgatttactcgtggatgaactatgtggcactgcttgttttcatgatgcttcctttccttgtggcccgcaggctgaaagaagcattgatacactataaatacctaccctgatgaaacagattaccttcaaacagaaagtagtacaaggcatatacgacctgttctatatatggaagcaggaattacgcaacctctttcgcgaccagggtgtgctgatattctttgtactcgttccgttgacatatcctttgatatactcgttcatctataccaacgaaacagtccgtgaagtgcccgccgtggtggtggacaactcgcgcagttccctgagccgggaatatctgaggaaagtggatgccagtcccgaaacaagcatcgtggcgcattgcgctgatatggaagaagccagactcatgctgaaagagcgcaaggcatacggcatcatctacataccctccggcttcagcgatgacatagtccggggcaagcagacgcaagtcagcatcttctgcgacatgagcggactgctctattacaaggcattgctcactgccaacaccaacgtgtcgctcgccatgaatgcggatattaaaatggaacgtgccggcaatactaccacccgccaggatgaaataacagcctaccccatcgagtatgaggacatagccatcttcaaccccaccaacgggtttgccgccttcctgatacctgccgtactcatactgattatacagcagacattgctgttgggtatcggtctggctgccggaacagcccgcgagcaaaaccggttcaaagaattgattcctgacgaccctcattacaacggaacattccgtatcgtcatgggaaaaggattgagttattttatggtctactcgctggtagccgtgtacatactatgtgtagtaccgcgccttttcagcctcaaccagatagcaattcccagtgtgctggctctgtttgccctgccctacctgacagcctgcatcttctttgcaatgacagcatccattgccatacgcaaccgggaaacctgtatgttattgtttgtgttcacttccgtaccgctgttattcctctccggcatctcctggccaggcgccgcaatgcccgaattctggaggtatttttcctatatcttcccttccactttcggaatcaacggctatgtacgtatcaacagcatgggagccaccctcaacgaagtagccttcgagtatcaggccctatggatacaaaccggaatttacttcctcaccacctgcctcgtctaccagagaaagagcggttagcgattagtgttatcactaatccctaaccgctaacctatagcataccggcactgtgctgttgcctacgcgatagatgccgaacttgaagtagtagccgtcgtcgtcgttgcgtcctatcaggatttcttcgttattcacgatatgctctttaacggttttctttttgtcggcatactccatctgcacatccagcttacccggtttcacaatggtttcggcttccttgccgtaggtggtccagtcgatatgaatgcggaaagtcacccagcaatctttggggaagtcggcaaaaggcattttataggctatcgtagaagccttgtattcggaagtaacgggcttcattatcggagtcttttccggattggcattgcaacggtcgtctttgtcggtcagccagcggcggtccgaattggccttgatgtagaaccaaccgccggaaaatccgaaagccagcggcggataaccgccctgctctaccagccagccgttcttcttccctgccttataaacagggtttccctttttatctttcatcggatttcccagcttatccaacttcgccaccttttcatacccggtattcttcttgaagatagtagtcttatccagctctatgaactcgtcaacggtcagcttcttcacttcaccctcaggagtctgcacaagcgtgcggtcgggcatgccgtgccattgggcaaaaatggtggacacattgctgtccaaatcagacgggatatatacggaaaactcataatcgcgcgaagccccttgcggacagatgccttttccgtgatgatatacggttttcgtaatttgcgctttccggtaagcatccgccggcagtccgttaaaatccgccgaagtggcataacaataagaaagctcggcacggcctttggtttctcccttgccgtatccctccaatgtgttgtcctcccgacgcagttcgaaacggtaagaaggcttgccgttgaacagacatgtgaaatcccgctgaatcgcgtgtttcttctttgcaccgacagccacccagcgaccgtctataatctggtcgatacgtgcagagtctgcctgaacattcacccgttcggtcaggggaaccaacgtttcagcgcctttggtttgtgcggtcagcgttgccatgcaccccgctgccgtcaccatgcagatagcaaaaatgtttttcttcatccttatttgatattaaacttaaaaacgatgcggcaaaagtacgaaagctgcgcctcacacctatcccctatttgtttcggaaaaccctatatttgtgcaaatactccacaagatatagaaattctgaaagatattagtatctttggtccatcataaattttacggttcaataatgagtatcctgaaaaagataacaaccatcctgtttattttatgtataacgggagtctctaacgcttatccggaagcttggggacagataaacttttcttatatatccattaacgacggtctgtcacaaagcacggtcttctccatagcgcaggacaagctcggcaatatgtggttcgccacctacgacggcgtcaacaagtacgacggatacacatttaccgtatatcagcacgatgaaaacgaccccaacagcatcgccaacgacatctcccgcattgttatgaccgacagcaaggggcgtgtatggatcggcacccgcgacggcctgtcgtattatgacgaggaaaaagacaagttccagaacttcttcctcgaaaagaacggcaagcacctgcaagtcaacggcattgtggaactttcgccggagcggctgcttatcagcacgctcgaaggactgactatgttcgacatccccgcatcccgttttgtagacgacatattcggcacggcaatgcacaaaatggttgcatccgccctgtacaggcatgacgaccaaatctatataggcacaccgtcggacggtctgtactgctattccattccgaagaatacactcgaaaaactcgcttacattccaggcagcaagcaaatccaaagcatcctgcagcaatctcctacccgtatatgggtagccacggaaggttccggccttctccttgtcaaccccaagacccgggaagtcaaaacatacaggcattccccttccgacccgcaatccatcagctccaactatatccgctcactggcactggattcacaaaaccgcttgtggataggaactttcaacgacctcaacatctaccatgaaggaaacgactcgttcatgtcctacagcagcaatcccgtagaaagcggcagcctgtcgcaacgctccgtacgcagtatcttcatggactcgcaaggcggcatgtggctgggaacgtatttcggcggactgaattattaccaccccatccgcaaccgcttcaagaacatagagcacatcccgttcaagaactcgctgagcgacaatgttgcaagctgtatcgttgaggacaagcagaagaacctttggataggaaccaacgacggcggcttgaacctctacgtccccggcgctcagaagttcatccactacgcattgcaggaaagccagcgcgaagacggcttaggctccaacaacatcaaatccgtatacgtggacgaaccgagaggactggtatacatcggcgcacatgccggcggcctgagcatcctgcatcgcaacagcggacgcatggaaaacttcaaccagctcaacagcccgttaatcaatgagaacgtatatgccatccttcccgacggagagaacaatttccttttaggaacattaagcgctctggtacacttcaacccggaaaaacggagttttaccaccatcactcaggaaaatgacggaacgccaatcaacgtccagaagattactaccctgttccgggattccaaaaagcgtctttggataggcggtgaggaaggagtgtccgtattcaaccagcatggaacctccatacagaaagcggacattttacccgaatccaccgctacgaaagcattcaccaattacatctacgaggcaaacaacggtttggtctggataggtacacgcgaaggattctattgtttcgacgagaaagccaaacagattaaacggtataccaaagccgacggactgcccaacaacgtggtttacggcattctcgaagactcttacggccgcctgtggatgagtaccaaccggggtatctcatgcttcaatccggaaacggagaaattccgcaacttcaccgaagcggacggattgcagagcaatcagttcaacacctcttcctgctaccgcacttccgatggcgagatgtacttcggaggcataaacggccttaccacattccgtccggaactgttgcaggacaatccctataccccgccggtagtaatcaccaagctacagcttttcaacaagaccgtccgtcccgacgatgaaaccggcattctgagcaagaatatcagcgacacggaaagcatcacgctgaaatcctggcagacagcattctccctggagtttgtcgtatcgaactacatctccggacagcataatacattcgcctacaaattagacggttacgataaagagtggtactacctcacggacaggcatccggtgtcctactccaacctgccgcaaggtacttatcacttcatggtgaaagccgccaataacgacggcaaatggaacaccacgcctaccgtactggaaatcgttattctgcccgtgtggtacaagacctggtgggctgtcatactgttccttgccacttttgccggctttgtcacattcgtattccgcttcttctggatgcgcaagaaaatggaagcagagcttgaaatcgaacgccgcgacaaggaacaccgcgaagaaatcaaccagatgaagatgcgcttcttcatcaacatttcgcatgaactccgtacaccgcttaccttaatcctggcaccgcttcaagaggtcatcagtaaaatcaacgaccgctggacccgcaaccaactggaatacatccagcggaatgccaaccgcctgctgcatcttgtcaaccagcttatggactaccgccgggcggaactcggagttttcgagctgaaaataaagaaaggcaatgcctatcgcctgatacgcgagaacttcctgtattatgacaagctggcacgccacaaagagatacactacgctttccactccgatttggaagaaaaagaggaacttttcgaccctaactatctggaactgattgtcaacaatcttttgtccaatgctttcaaatatacggacaacggaaagagtatcaccgttaccctgaaagaggaaaacaactggctgatactgcaagtgagcgacaccggtgccggcattcctatcaataagcagggtaaagtgttcgaacgcttctatcagatagaaagccagcatataggaagcggcatcggactgtcactggtacagcgtctggtcgatttgcaccacggacgcatcgaactggagagcgaagagggcaagggaagtacattctccgtctatctgccgcaagacctggctgtttataaggccaccgagctggcaggctccaacacttccaaggaagaagagcaggtgtactccaccaactccaaagaaatgtatttcatcgatacggagaaaatggagaatgaagccatagaaacgggcgacaagaaacgcggaaccatccttattgtggaagacaatcaggagattcgccattatctcagcagcggtttggctgcattgttcaacatactggaggccggaaacggtgaagaagcattggaaaaactgaagaaccatgaggcggacattattatcaccgatgtcatgatgcctgtaatggacggcatcaagctgtgtaagaatatcaaacagaatattcgtacctgccacattccggttatcatcctgtctgccaaaaccgacataaaagaccagttggaaggcctgcaagtaggtgcggatgattatatctccaagcctttctccatcgccgtcctcacttccaagatacagaacatgatgcgtacccgccgccacatgctcgagaagtacgccaaatccttggaagtggaaccggagaagattactttcaatgccatggacgaagagctgctgaaacgcgccgtaagcatcgtagaagaaaacattgataattttgagttctctaccgatgaatttgcgcaaaagatgaatatgagccgctccaacctgcatttgaaactgaaagcaatcaccggagagtcagccatcgactttatccgtaaagtacggttcaaaagggctaccgaactgctgaaaagcggacgttatacggtaaccgaagtcagcagcatggtgggatttaattcatcttcttattttgcaacttgctttaagaagtatataggctgtttgccgacggagtacattaaaaaagtaaaaggataggccttatcccgcaaggcaattttgcttttcaaaacaccgcatgttagcgtccgaaacaccgcgtctttgcgagtgaaatgccgcgctataacagataaaatccctgaggtttgccaagcaaatgcctgcactttcgggtggtaaggtgtggagttttatatgcaattgtgtagcattgccaatgaagctctacaaccgggcttcacccgctatcccgcatgaataaagagttgtgaagggtgaaggaggtacaggctaacattttttctgataagatactgatagaatgcacataagaaaggatagttcctattcatccgaacacccctctcagaatacctcatgcaggctttttaaacaaatacgatatttcattcaacaaatttaataataaaattcagatttcaaagaaagcataaacaagacagattagctcttagaaatcaatgtaatatatttgcggcaaggaaaattgaaacttttactaataaaaaacaacttaagtatgaagaacactctttttatctgtttgttcgcaatgtttgcactctccggatgtgttgacgacgaagaagaattcgccacaggcggaaacatcagtccagaactgactcctgagaacaaagaaaacgcagtattgaacactgctgtttttgaccaactcaacctcgactatcccggcttggaaaaagtaaagcaatatcatgaagcaggtgaggattatcttgcggccagcgcattgttggaatattaccgaacacgaactaatgttataaatcctaatctctcattggtcgatgtaacttacagcgatgctgatttatccaaagcaaattatgcattagaatatcgtttttatgttaacggacaacttgaagatcctgctataggaaaaccatattctgtaggaaaagcaggagctatcaattgggccaataatcctaaaggaacaagtgcagaatatcagaaacagttacaccgtcatcaatggttcataccgcaagctaaagtatatcgtggaacccatgatgagaaatatatcaattcctggattgaagtatatggcgattggattgtccaaaacccgaagccagaagcaggacctatagacgaaggtccttggtggcagctacaagtagcgacacgcgttcttgatcaagtacagcttttggattattataaaacatcttccaattttactcctgaatggctcaccacatttctggtatcctttgcagaacaagctgattttttgcaggcgtatccttataagtctggtggaaacatccttataacacaagccaatgcgcttgctacagccggtacattaatgcctgaatttaaaaatgcagaaaactggaagaacaaaggaaatgaaatcttaaatactgagatacagcaatttcttgcagacggttggcacaaagaattttctctgcactatcatattggagtaattgataatttttatgaagcaatgaagttagctaatgctaatggacaatcagtagagtttaaagatgcactccgaaaagcagtcgaggtggtaatgcactttacctatcctaatttttttgccaaaggtagcagcagtgacagcgaagagaaattagaccaaattgttcctatgtttaatgattcatggaataagactcgtagtatacttactaaaaatttcaaaaaatactcagaaatgttcccagagagtgacgaattgaagtacatggccacatcaggaaacggtggtgcatctcaaggtaatactccaggaaacgaaatgaaactatttgaagatgcaggattttatatcatgcgtaatggatgggttcccgaatcaacagtaatgattttcagcaataacaaatttaatgacgaatctaccagttttgcttcttatagccataaccagccagataatggtacatttgaactatatatcaacgagcgaaacttcttccctgattcgggtgtatgtgcttatgaaagtagcgacaagaccatacaaggctaccgtaactggcatcgtaaaacaatgcaccataatacattgacacttgatgaccggaattgtgagaaagctgacggtaagttactacaatctgaaactaaagggaacgttgagacacttgtttttgaaaatcaaagttatcccaatatgcgtcatcgccgtgccgtattctatgtaaataaggagttttttgtattggtagacgagggtatcggcagcgcggctggttctgcaaatttaagtttcaatctttgcagatatgagtcggaagtagaatatgatgccaatgaaatgggagctcatactacattcacagataataatatcgtagtacggacatttactaacgaaacagccactttcaatgaaatggaaggaagagtagcctatgttgtaaaaaatgatgtatttgacaagcgcaaagcttatcaaattaaaataaataaattagctaataaaacagctcgttttattacggttatttatccttgtaagaaaacagaaggacaaactattgaagcagtattcacagataatggatacagtgcaaacggagcatcaatcaaagtaactattaatggtatagaatacccattatcttatatcttgcaatccaataatttttaaaatatgaaatctaaattatcaagcacgttcaacaagctacgaattatcatggtagctgcattaactgtgttctgtgtctcttgtgataagacagagacaacagatacaacagggtttattcttcactatctgggtataacagatataggccccagcatgtcatacacattaaaagcacctgcttataaaggcagtacgccttatgattttacaatcacaaagattacacttgataacgaatctttcagcaacaatgacaactttgtgataaattccgaaactggtgaaattacagttcagaacactgatgagatgaaaccaggattatacaatattagcgtaggttgctattctaatggcaaattctttgatttcaaagatgctgtgcaagtaaatatgctactcgcagtacccgaaggtgtatcagtagaacctgcagaagtattagtaaaaatggaggatgaaaattggtgggaagccagtgctaaagtaactactgacacagaaaaacatgtaagtattactaagtatgaattcgctgaggacgaaagtaaagaatacataaagtatttcacaatttcgaatacaggggtcatcactttcaatcctgaccataaagatgagattatccccggagaaaagtacattctaagcttgaaactaacaacaaaagctggagagcacctttatccagacgcagtaacattcaatgtcatttccaagccgttaaatctattatataagcccaatactgtgcgagtagaacaaaatacagcacacgaatcacaaataccgaccattcaaggttcgaaaggaatgacctatgctatcaaatctgttactccagaggttgccggcttcacaatcgatgaaacaactggtaaaattagtttagcagaaaatagtacacttgagatcggtaatgtttataagattgacgtaactgtgactaatgaatacggttcagcagattttgcagaggcttacactgtaacaattgtagattatatagaacctattgaccctgaaacgttcaaatatgtagtaccagaaacctatgaagaaaaagcctataaaatccctgtagaccctaaatttaaaggtgatgaagctatatttagctttacaaataacactggtattattcaggaacacattaataataataaaattacaattgaccctgtcagtggtacgatttctataacggcagacaacactttagctcctggtaattataaaataaatgtcaaagttgtaggtcctactgaagataaaggagaagcaacaacaactgttgtcttagaaatcaaagccaatcctaataaattcacactctactatggaaataatatcggattaaacacggttcaacatgcaaaccaattcgcctatagttctaaagacgagatggataatgcagagctaatacctactgttaatttcctcacaaatacaactactcctaacatcaaatgggaataccaaataaaagatcttattggaggcaataaatcaattggagtaggaaaggatgcagtacttgatacacaaacaggaaagattacattatctaaaaatggttatacaactggctctatgaatatggggttgataatcgttaaagcaacagcaggcgatggggatttagcatactccgtaacaactccaatattcattagatgcaatgtagaaaaaaatggtgtattcgttaaatattctccatttgtgtttaaagtcaatcccaaaataggtggttggtctgaagctccaataatagaaaaacctacagaccacacaactttaaaaatggatttccgaaaagatattaattattttaacattgagattactgacaatcccaaaggacttactcctacatctagtcccctaaaagaagtttgggattctttctttgcagatattgataagactgtatcttactcatctattaaacctatttcatattataacacagatagtaatattgataataaaagcataacagatagactattaggttacgtagacccaataagcaaagctattagaattaatcctgaaaaatggaaaaacgaaaaaggagaatatattaacgggatattatttgctagaatagcatatactacagatggcacgattccaaatagccaagtattttatcctattgctatttggttcgatgagacctacggagataactaataatctaacaaaaaagtaaaaagcattatgtacaaaacatatcacacactgagcaaaagagggtacatcaccctcttagctctcctcgtctccattatcactttcgcacaaggtgtaacagtgaaaggaactgtgctcgacgaaaataaagagcctctaattggtgctacaattcaagtaaaaggtgagaacaacggtgttgcagctgacctagatggtaacttcactctcaaagtaaagaaaaacgccacactggtagttagctacatcggatacttgacgcaggaagtccgcctgcaaggaaaaacacagataacagtacaactaactcctgacagcaaaactttggatgaggtaattgtcgtaggctatggtaccatgaaaaaaagcgacttgacaggctctgttgcttccgtagcttctaaggacattgaaggcttccagacaagttctgtagccggagctttaggaggccaaattgccggtgttcaaattacgtctactgacggaactcctggtgcaggcttcaacatcagtattcgcggtgtgggaacattaactggagatgcctctccgctttatattgtggacggattcgaagtttcggacatagattatctttcaaactccgatattgagtctatcgaagtattaaaagacgcctcttcatctgctatctatggtgcacgtgctgccaatggtgttgtgttaatcactactaaatccggtaaagcaggcaagacaactatttcttacaatggttctgctacctaccgtaaaatctcaaagacattagacctgctctctccatatgaattcgtaaaactacaaggagaagtcaacgaagcttacagtagtacttatttcaaagcagagaatgacgcagatggtaatccttataaataccaaacacttgatgattatattggtgtaaccggagtagattggcaaggtgaaaccttcaaccctacttggtcacaagaccataacataagtattatgggaggaaccgacaatactaaatacaacggctcactctcacgttatgtggaaaacggtatcttcaaaaacagtggtttcgacagaactacagctaaattccgcttagaccagaagatcaacaaaaaagtatctttcaatctaacggtaaactatgccatgactaaccgtaaaggtgtaggtacatctggtgactccggtcgcttcaacatgttggcacagatattaagtgcacgtcctactggtggtctgaaaatgactaatgaagaacttttggaatcggctattgaccctgaaatgttaagtactggtgaaagcttggcacaagtaaatcccgtaaaacaagcagaatctgtaacgaatgataagcgcgctgaaatgtggtcggccaatgcagccgtaaattggcagattatcaaagggttgacattcaagacaagcggttcctataacacaaccaataaccgtacagatatattctacagagatggctcgaaagaggcttaccgtaacggacagaaaccatacggaagaacgcagatgggacgtgatgtccgttggactaatacaaatacactgacatggaaagataaggtaaaaaaacacaactatgatgtgatgttggctcacgaagtatcttttagaagcagtgagtatttacttggtgaagcaatggacttcccctttgataatttgggtaatgacaacttagggttgggagctacaccaagtaaagttaataccaactattatgacaaaactttactttctttctttgcccgtgccaactataactatgacaaccgttacttactgacagcaactgtacgtaccgatggttctactgtattctctaacaagaataaatggggtttcttcccctcattctctgccgcatggcgagtatcggaagaagcatttatgaaagaccttaaatggatttccaatttcaaagttcgttttggttggggtattgtaggtaatgaccgtatcagtaactatttgtctatggatttgtatacagacaacaaatatggcattggtaatagtacagtaactgttttgacacccaagcaactaaaaaattccaacttaaaatgggaaggttcaagttctgttaacttaggtttggatttaggcttcttcgataatcgtttgaatgtaacagccgatttctttatcaagaacactaaagacctattattagcacaatcgctggcacaggcaaccggctttacctcacaatggcaaaatatcggtaagattcagaacaaaggtatcgaattgagtataacctctaccaacatacagactaaagagtttacatggaataccaatttcaatatctcatttatccggaatgagttaaaagcattggcagacggtgcaagccacatgtatgcacgttctggttttgatagcaattttaccagttacgactacattgctaaagttggtgaatctttaggattgatttacggttacgaattcgatggagtctatcaatatgatgatttctatactgatacaaatggtaatttggtattgaaaccgggaatcacccaaaactcacgctacagcaaggataagaaagtaggcgcccgccccggtgttacaaaatataaagaccaagatggcgacggcgatattacaaccaatgaccgtaccgttattggtaatgccatgccgaaatggtttggtggaatcaccaatacattcgaatacaaaggcttcgatctgagctttatgttccaattcaactatggcaatgacatctacaacgctacacgtttatatgctacacaaagccgtagcggacgtcgtaatatgcttgctgaagtggcagaccgttggagtccgaccaatgcctcgaatgtggttcctgcttacgatggctacatcactaatgatgtatactcacgtttcgttgaagacggttcattcctgcgcctgaagaatctgacattaggatatactttgccgaaaaaatggacgaacaagttccatgcttccagacttcgtgtgtatgctaccggtcagaatctgttctgtttgagtaattacagcggctacgacccggaagtcaatagtctgaacaacccaatgatgccaggcttggactggggtgcttatcctaagagccgtgtattcacagtaggaatcgaccttcaattctaattcataaaataatatacatatgaaaaagtttatatactatataggaattttagccttatgccttcttccagctgcatgttctctggaagaagaaagtagcactgaagtagaaaaaaataaatatatgaatgacgccaaagaggcacaagatgtactacttggagtataccgttctactatagaagaaggaatgtatggtcatcatctatccatttatttctctatgggaacagatatttcacaagtagagggaagcacaactgaaaatttccgtattcttcctacgaacgcatattctgcttcacaagctgaagtacagacctcatgggcatctctttatagcggaatctataatgcaaatgattttctggaacgcatttctgtgaaaatggattcgtataatgaatccgacaaacaattggcaacaatttatattgccgaagcaagagctttacgagcattgtactattttgagttagttcgtcgttggggaaatattcctttaatgactaatacagctatggctaatcaacacccctcaactttcgtacaagccgaccctgttgatgtttataaatttatcgaagacgatttattgtatgcctgcgatattcttccatatgccaaagatgacacttatcgtagtagtaacgattatcgtttttcaaaaggagcagctttgggattactcactaaagtatatgccacttgggctggatatcccatacaggacacaagcaaatgggaagcagctgcggaaacagcacgtatcctaattgaatcgggcaaacatgatttgctgactgactatgaaaaattatgggaaaatacttgtaacggaatttgggacccaacagaaagtttaattgaagtatctttctattctcccacatattcaggaaacagtgatcctgtaggccgtatcggaaagtggaacggcgtaaagaccacagtcgatgccggtcgcagcggaagtactgctgccaacgttcaggttgttcattcatttgtacttaattggagagaagaggcacaacccgatgcaagcactggcataagtcccgacagacgtcaaaatttgtctatagccaactataaacatggacacaatgacagcaaaaccggagcagtttatttaggcgattactatttagcggccagcattccaaccgatgatgaagccacagcattaagcaaggatttagatcctgaaaaatctcaaaaagccaaacaaacttacacgccggccaaatgggatattgataaatacatggaaagtataccttttgtcaacaacgacaaatcaactgtaaactggtatgttttacgttatgcggatgtactgctactatatgcagaagcactgaatgagtggaaaggcggacctaccacagacgcttatgccgctattaataaagtacggaaacgtggttatggaaataagggcaactattcgttaccagaaggtatggatcaagctactttccgaaaggctgttcataaagaacgggcctatgaattagctttcgaaggtcaccgtcgtctcgatttaatacgttggggtatttactacgagaccattcaagaaacatataatgaattgaaaaactggtggagttctgcgagctatgtagtatacgactacacgaaaaaaggtcagcacgaactgatgcctattccgcaacgcgaaatggacttgtgtacccagttcaaccaaaacccaggttggtaacaaccaccccaaatacatctccaatatgcccctccccgggcatattggagattttctaaactcttttcaacaaaagtgacattcaaagaacgcggattaattgccttttcaacattcttgctacaagaaccataaaaaatccgttagctttgctttcgttacaaaatctactaaaatcaattattttaaaaacgaataacatgaaaaagaaccttgttctcttggctttgggtgcattgactttcgtgtcatgccaaacacaacccaaagaagactacagttggattaaaaaaggcttggacgcagcctctgcgcaactgcaattaaccgcagaagaaatttcgtccactaatatgctgccgcgttctatccgtacaggctatgacatgaacttcctgtgccaccagttggaaagagactcgcttactttcaaggactcgctccgtgcgcagcctacagccgaccagttgggaaaacgccgtttgtgcagcgtttatgactggaccagcggtttctatccgggctctttgtggtatgcctacgaactgacgggcaacgatacactgaaaacatgggccatccaatataccaacctgttgaaccccgtccgttactacaccggtacgcacgacctgggcttcatggtaaattgcagttacggcaacgcagagcgtctggctcctaacgacaccattgcagccgtaatgaaagaaactgccgacaacctgtgcggacgcttcaacgattccatctcggctatccgttcatgggacttcggaacatggaacttccccgttatcatcgacaatatgatgaacctggatttgctgttcaatgtagccaaggcaaccggcaacaactcttataaagacatcgccgtaaaacacgcaatgactaccatgaacaaccacttccgccccgactatacctgctggcacgtagtaagctacaacaacgacggcacggtagagaagaaacagacattccagggcaagaacgacgactcttcatgggcacgcggacaagcatgggccgtatacggctataccgcctgctatcgtgagacgcaagacactactttcctgaatttcgccgtaaaagtggccgacatgattatgaaccgtgtcaagaccgacgatgccattccttactgggactacgacgctcccgtaaccgaagagactccgcgcgacgcatccgccgcttccgtaaccgcttccgccctgatagagctgagcacaatggttcccgacggaaagaaatacctggattatgcagaaaaaatcctgaagagcctgtcgggcgacgcctatctggcaaaggtcggcgaaaaccagggattcatcctgatgcactctaccggttcgctgcctaacggttcggaaatcgacactccgttgaactatgcggattactattacctggaagctctgaaacgcttcatggacttgaaaggtatcagctacaaaaacctctaataaccagactgtaaaccaacaaacattatgaataagacttttaaatatatcgtcctgctggcacttgcctgcttcgttggcaaagcaaatgcccaggaattgaaaaccgaagtgttctcgctcctcaacctggattatcccggactggagaaagtaaaggccctgcaccaggaaggcaaagatgccgatgcagccaaagcgttgctcgactactaccgtgcacgtaccaacgtgaagactcccgacataaacctgaaaaaggttaccatcggcaaggacgaacagaaaatggccgacgaggctctgcaacatacattctttgcccacaaaggctaccagccgtcattcaattacggtgaagacatcgactggagatactggccggtaaaggacaacgaactgcgctggcagttgcaccgccacaaatggtttactcccatgggcaaggcctatcgtgtaagcggcgacgagaaatacgccgtagagtggaccaaacagtacatcgactggatcaagaaaaacccgctggtgaaggttgacaagaaagagtatgaaatgaccggtgacaaccaactgaaaggtgatgtggaaaacgcacgtttcgcatggcgtccgctggaagtgagcaaccgtctgcaagaccagacctcacagttccaactgttcctcccgtctccctctttcaccccggagttcctgaccgagttcctggtaaactaccacaaacatgccatccatatactgggcaattactctgcacagggcaatcacctgctgttcgaggcacagcgtatgatctacgccggcgctttcttccccgaattcaaagaggctgctgcctggagaaagagcggtatcgacatcatgaaccgtgaaatcaacgtacaggtgtataacgacggcggacagttcgagctcgacccgcactaccacctcgctgccatcaacattttctgcaaggcactgaacattgccgacctgaacggtttccgcaacgagttcccgcaggagtacctggatacaatcgagaaaatgattgtattctatgccaacgtttctttccccgactacaccaacccgtgtttcagcgatgccaagctgaccaataagaaagaaatgctgaagaactaccgcaactggagcaagatgttcccgaagaaccagttcatcaaatatctggcaaccgatggtaaagaaggcgcactgcccgaatatctctccaaaggtttcctgaaatccggtttcttcgtattccgtaactcttggggaacggatgccatgcaaatggttgtaaaggccggcccgaaagcattctggcactgccagccggataacggtactttcgaactctggttcaacggcaaaaacctgttccccgattctggttcgtacgtatatgccggcgagggcgaagtgatggaacaacgcaactggcaccgtcagacctgcgtacacaacaccgtaacgctgaacaacaagaatctggaccagaccgaatccgtaaccaagctgtggcagccggaaggcaacgtacagatattggttaccgagaatccgagctacaagaacctgaaacaccgccgttccgtattcttcgtagacaacagctacttcgtaattgtagacgaaatggtgggaagccagaaaggttccatcaacctgcactaccagatgccgaaaggcgaaatcgccaacagccgcgaggacatgactttcgtcactcagtttgaagaaggaagcaacatgaagctgcaatgcttcggccccgaaggcatgacgatgaaaaaagagccgggctggtgctccaccgcttaccgcaaacgctacaaacgcatgaacgtatccttcaatgtgaagaaagacagcgaagatgcagtacgttacatcaccgttatctgtccgataaagaacagcgcagacgcccccaaattgtctgccaagttcaaaaacaaggcattcaatgaaaacggactggaagtagaggtgaaagtaaacggcaagaaacagtctttaaattacaaattataatataaaagcaacatgacgaaagggagtgcccaaaaatgaaaagcaaagcgatagcaattttagtttttgagcagtccctttcttcataatgaaaagcgatacatcccggttatgaaaaacaatctttccaatgtacttcttccgttagccacattaagcctcgcttcctgtgccggccagcaaaaagaagaacccaagcgtccgaacataattttcatgatgacggacgaccataccacacaagccatgtcctgctatggcggcaatctcctgcaaactcccaacatggatcgtatagccaacgaaggtatccgtatggacaactgctacgcggtcaatgccctttccggcccgtcacgcgcctgcgtccttaccggtaagttcagccacgaaaacggctttacggataatgcaagcaccttcaacggcgaccagcagacattcccgaaactgctccagcaagccggctaccagacggccatgatcggcaaatggcaccttatcagcgaaccgcagggcttcgaccactggagcatcctgagcggccagcacgaacagggcgattattacgaccccgatttctgggaagacggcaaacatatcgtagagaaaggttatgccacggacatcatcacagacaaggccatcaaattcctcgaaggcagggacaagaacaaaccgttctgcatgatgtatcatcagaaagcgcctcaccgcaactggatgccggctccgcgccacttgggcatctttaacaataccacattcccggaacctgccagcctgttcgacgactacgagggacgcggcagagcagcccgcgaacaggacatgtccatcgaacataccctgaccaacgactgggacctgaaactgctgacccgcgaagagatgctgaaggataccaccaaccgcctttacagcgtgtacaagcgcatgcctgccgccgtacaggacaaatgggactccgtatatgcgcagcgcattgccgaataccgcaaaggcgacctgaaaggtaaggcgttaatcagttggaaataccagcaatacatgcgcgactacctggctaccgtactgtctgtggacgaaaatatcggccgccttctgaactatcttgaaaagaccggagagctggacaatacaatcatcgtctacacttccgaccagggcttcttcctcggcgaacacggctggttcgacaagcgcttcatgtacgaggaatgccagcgcatgccgcttatcatccgctaccccaaagctatcaaggcgggaagcacaagcaatgcaatctgcatgaatgtggactttgctcccactttcctcaactttgccggtgtggaaatcccgtcggacattcagggaacttccttgaaaccggtgttggagaacgaaggcaagacacccgccgactggcgcaaggctgcctactaccactattatgaataccctgccgagcattcggtaaaacgtcattacggcatccgtacacaggacttcaaactgattcatttctacaacgacatcgacgaatgggaaatgtacgacctgaaagccgacccgcgcgaaatgaacaacgtgttcggcaagcccgaatacgccgaaaagcagaaagagctgatgcaactgctgcaagagactcaaaaacagtataaagacaacgaccccgacgaaaaagtaaacgagcttttcaagggcgacagaagattaatgaaaaacagataaaaccattaaatttattatcatggatagaagaagttttctaaaaaacacaggctggtcttttctcggactggcagcttcgggaagcctgctcggctcttgcgtggcaggaagtaaagaagcaaagaagattatgccgtcggcaagcaacctgaaagtattctggggcgacttgcacaaccactgcaacctcacttacggacacggcgatatgcgcgatgctttcgaggcggccaaaggccagctggactttgtcagcgtaacgccccatgccatgtggccggacattccgggtgcaaacgaccctcgtctgaaatgggtaatcgactaccataccggagctttcaagcgtctgcgcgaaggcggctatgagaagtacgtaaagatgagcaacgaatacaacaaggaaggcgaattccttaccttcatcggatacgaggcccacagcatggagcacggcgaccacgtggcgctgaactacgacctggatgcgccgctcgtggaatgtacctctatcgaagactggaaagagaaagccaaaggacataaagtattcgtcactccgcaccacatgggctatcagggcggttatcgcggttacaactggaaatgcttcaccgaaggagacatcactccgttcgtcgagatgtattcccgtcacggcctggcggaaagcgaccagggcgactatccgtacctgcacgatatgggtccccgccaatgggaaggaaccatccagtacggtctggagcaaggacataaattcggtatcatggcttccaccgaccagcactccggctatccgggcagctacggcgacggccgcatcggtgtcctggctccgtcactgacccgcgacgccatttgggaagctctccgcacccgccacgtatgtgccgccaccggtgataaaatcatcatcgacttccgcctcaacgacgctttcatgggcgatgtagtccgtggcaacagccgtcgcatctacctgaacgtaaccggcgaaagctgcatcgactatgtagacgttgtcaagaacggccagatactggcacgcatgaacggcccgttgaccccggttgcaccggaaggcgacaccgtccgctgcaaagtaaaagtggatttcggctggaaccgcgaagagcgctatgtgcactggcaaggcaagctgtctgtcaacaagggccgtatcgtaagcgttaccccctgcttccgcggcgctgccttcacctctcctcaggagggcgaaaccgaattcaagacacatgtcaaccgcatcctctccgtaggcgagaaggaaacggaactggacctgtacagcagcaagaacccgaataccaccaccgcagccatgcaggcggtaatcctcgacttggagatgccgaaagacggcgtgcttaccgcagacttcaacggcaagaagttcgaacacacattgggcgaactgctcgaaggctcacgttcgcacttcatgataggctggttgagcgaagccattctctttaaccgcgccatgcccgaaagctgcttcaccgtagagcactatatggaagacaaagagccgcagcgcgacaccgattattattatgtacgcgtgcgccagcgcgacggacaatgggcatggagttctcctatatgggctgaaagagtttgacaatcatgaaaaaatacgctataggaattgaccttggcggtacttccgtgaaatacgcccttatcgacaatgaaggcgtatttcactttcaagggaagctgccgtcgaaagccgatgtatctgcggaagcggtaatcggccagttggtaaccgcctgcaaagaggcaatggcttcggccctgcaactcggagtagcggtggaaggaataggtataggcactcccggcattgtggacgaaaccaaccgcattgtgctgggcggagccgagaatatcaaaggctgggagaatctgaatcttgccgaccgcatcgaagcggaaacggggctgcccgtgcagatgggcaacgacgccaacctgatgggactgggagaaacgatgtacggagccggacaaggcgcacagaatgtagtgttcctgaccgtgggaaccggcatcggcggcgcagtggtcatcggtggcaagctgttcaacggctttgccaaccgcggcaccgaactgggccatgtgcccctcatcgccaacggcgaaccctgcgcatgcggctctgtgggctgtctggaacattacgcctccacttccgcactggtgcgccgtttcagcaagcgtgccgcagaagcaggcatctcgtttccgggcgaggaaatcaacggagagcttatcgtacgcctctacaaagaaggagacaagctggcaacggaatgcctggacgagcattgcgattttctggggcacggcatcgccggattcatcaacatcttcagcccgcaacgcatcgtaataggcggcggactgtccgaagccggcgacttctatatccggaaagtcagcgagaaggcacaccgctatgccatagccgactgtgccgtgaacactcaaatcatggctgcatctttaggtaacaaggcaggaagcatcggcgccgcgtcactggtcttctcactaaacacgaaatagtatgaaaaagaatttaggaatgctggcgctgattatggcgttctggttcaccatatcgtttatcaccaatatcctgggaccgctcattccggacattatccataactttaacctgagcgacctggcgatggcgggctttatcccgacttctttcttcatcgcctatgccatcatgtcggttcctgccggactgatgatcgaccgtttcggcgagaaaccggtactgtttctgggcttcctgatgccgttcatcggcactacgctgtttgcctgcatacacacctaccccatgctgcttgcctcatcgttcatcatcggcttgggcatggctatgctgcaaactgtgctaaacccgttgcaacgcgttgtaggcggcgaagaaaactatgctttcgtggcggaagtggcccaattcgtattcggcatcgcttcgttcctgagcccgctggtatatacgtacctcattcacgaactcaatccggacatatacacggaaggcaggaactttttcatcgacctgctggcaggtatcaccccgcccgacctgccctgggtatcgctttactgggtattcacgttgctgttgctggtgatgctggttgccgtagggctttcccgtttcccgaaaatcgagttaaaagaagatgagaaaggcggttcgaaagactcctacctggcactgttcaggcagaaatacgtatggctgttcttcctcggcatcttctgttatgtaagtacggaacagggaacttccatctttatgagtacgttcctcgaacagtatcacggagtgaacccgcaggtggaaggcgcaaaggccgtaagttacttctggggactgatgactgccggctgcctcgtaggcatggtactgttgaagctcattgacagcaaacggctgctccaactatcgggcggactcaccatcatcctactgctcaccgcactcttcggaagcaaggaagcatccatcattgccttccctgccatcggtttcagcatttccatgatgtactccatcgtgttctcgctggcgctgaattcggcatcgcaacaccacggttcgtttgccggcatcctgtgttcggcaatcgtgggcggagcaggcggcccgatgattatcagcatgcttgccgatgccacttcgctgcgtaccggaatgctgattatcctcgtgtttgtaggctacatcacattcatcggtttctgggcgcacccgctgattaacaacaagacggtaagcctgaaagagcttttcaggaagtaaaagacaagaacggcacacaataaaaaagagaccgcaacggcttgctgccgcatgcggtctctttactttacacaaccctttttatatctaaaatctacataactggttcactactttccttccgcagcatccggccgggtatttatggtacagatgctcacccggttccagtccggttcttcaaacatataacccactccctgaccttcggcaacaatccggtctttggcgattctatatctattgaccagcatattgcgcacggcctcggcgcgttggcgggcgatgcgttcgttcacctccgcactgccttcgggagaggcataccctttgataacgactcccgcttccttatgatttctcagataagtggcgatgcgctccacattgggcaactgtgaattatcgatgccgattctgccctggcggaacgtaatcaccgactccaacagcttcttgctgttgtcgatagtatccttcaccacttccggtttccggttccggcaagctgccagttcactttccaaatcggaaactttccggttggcatcctgcaatactttggcagtattgtcggcctcggcacggagacggttgatttgggcgttcagttggttgacttccgcctggtcgtaaggccttacttcggtaaagtaatggcggccgttgctgcatccgaaatgataagtcagcccggcgctgatttcccaggctgcacggttggcatggaaacgcacggcttccgtacccatcgcgttcatatcatacaccaaagccggtttcacagccaatgtccatgccttgctttctcccaggttgaagttgaaattcagtcccagtttgctggacatactgttacggtcttcgcccataccggagtttacgtaataatgcaaccagccgatacctgccacggcctcaacctcaaacagacggggagcaccgttataccccgcaaacagattacctaagttgaccagccccagcagactgacgtttgacgcgtcaaaagccgttttgctgcccgtagtgttaaagctgcccatagcctccaggctcaggccgaaggcaggtgtcagatacttatccacatgaacgcccactaccggacgcatgttcttaaagaacgagtgatgcgtcagcggagtcgttccacccgcattgacacctatcgcccagttgtcggcaaacttgtttccggtcagcgccgtttgtccgtcagcgtagccaaccgcaacactcaacaataataaactcgctaaaatctttttcatacaattttctgttttaagttagtacataaatttataaatagatgttgaaagcctgtttacagagcttcccagtacttcatattggtaattctttccagcagcacttttctgtcgccctcgcgtacactgttgcctgccgcaaccgggatgatgcttgcccgtttgcctataccgtgccatttcagcatagctgccggaacgccacgttcgagcaatgcctcatacactcttttggcacggcggttggaaaggtccgtattataagcgctgcttccccttgcatcggtgtagccggtaatcaggaagcgggcgtcgggatagcttttcagaagcccggccagcctgtcgagcgttttttccgaagcagccgtcagcacatccttgtcaaactcgaagtagatattatccagcaggtcgcacgccattgcttcgacagaaccggctgtatccgcctgcttctctacaatccgctcaacaatcttttccacttcaacaggtttctctatctccacatacttcactaccggagcctgctttttgctctttccgccaatgcgccagatgacgcgggcagacacctgcacaaagtgaggaagattcttctgcaccggcaggagatattcaccttgcaggccaagcccgaaggaattgcttagccacgcatttacacctgcaccgaacgaaagcggaacaaaagagttcttatccgatgagcgcccgtcgggattccacacatcggacgattcccagtgcgcctctcccgtggggtcgtccacaaaattgccgccataggcagacgcgaaattcttatgcaggtaattcacccccactctgaggtagggttccacccattgagactcaaacaagggagtaaagcggaactgcatgcccaaaccgcccatatacagcaggtcgtgtttccggtcattgcccgcaatccggttcttgtttttcgctacgcctaccgtaccttgcaaatccagataaaaccaccggttcagttcccgtgccacatacaggtttgctcctcccatcaggtggttggccttcaggttgtacatataattatccggagtactctggaaaccggtgacagacacgcggctccagtttatcaacgaaccgcctgcacctatttcccatgctttcctgtcctggcctcttcccgtcagaggaactgacaggaagaagagggagacaagatatagtattgtttttttcttcatattcatatgtatttatctacgtaaatcaatcaattcatccagtctgccgggcaatcttttatctccaaaggtatgcgcttggttctgtccgcaaagtcagccaggaaatactgctcaccttctttcagcaagtaataagcaaatctgctgcgatattcgtaagtcgtgttatatgttatctgattagttcccttttgtctactccgaatatccagacctatccaattacccggataagcacttgtcagcataaagcgtttaccgccttccgaaagcggtacagtaccggtgtgcacagtacctcccgttccgttaacgaacgtacgcatttggatgaatacagcacgattttctgccaaagcggaagcaggcagcttgccttccggaaatttccagataccggtatccgggtctttcgcaaacttatcttgccctgtcggataagcatacgttttatagaaatcaggcaattggtctgtatcgatttcaccccataaagtggttactccctgtttgatttccaaaaagacagttccttccttgaaacccggaaccggatatatttccggaatatgaatcttatcctgcaaatatacggtctgtccataatcattataagaaccggcaccgtcaccgaagtaaaggcctgaataaaactcgttcccatcccactcgtattttaacaacccattaatcgtatcattctttgccacgttagctttttccgtaggagtcagtaccaaaggacgccgtatacggagatatgaataaccgtaatcataagtttgactcttatctttatccaaattctgttcatttacaggtaggtttatgtccttgattttagcagccttcatcatataagagttgagactacttggataatcgccccattctccatctatctgacgttcaaatttaaaagatatatttgcatatctggtagaatttatatcagacgaagcgttgctcaaatataccgtactcaccgtagccctcacatttaccctattcggaaccagcgtattattggcacttgtttcctgcactccgccaaccgttacggttacactgcctgtccggcgtgataaaggttggttgtccggcaacttatcccatgtcaccttgaactgtccgttgtcatcggttgtgaaggtttccgttgctcctactccgggcaatccgcttacctgcacgcctgcggctactttctttcccgttttgtcatacacggtaaagagcaccgaaccgtccgtaggaatcacatattcccgtaactgggagttccaataatcaggaatgacattatattttcctacttgtatttcaatcaccgaagacctacccgtcaggaaatcccagaagtccgtctgcttgttccggtctgccggccatttctggtcgggtttatgaggattatccacttcaccggatgcgatgtattctttccaaagttcataggcactctttccgttcgcaccatttgcgccgtttgtaccatttgttccgtttgtaccatccttaccggctttaccgaaagacggctttccggtatccgtaccattgatataccagttaccgttctcgccaatggccacctccggagatttcccgtcggcaccaacggcttttttacccgtatccgtaccgtctacgaaccagttgccgttattaccgatggtaatcgtgggcgacacgccgtcttttccattcgtacccgtggctttcttaccggtgtccacaccattgacaaaccagtggtcgttagcaccgatggttacggtaggcggcacggcatctttaccgttcgcaccgtccttgcctgcttctccctgcgcggcaatgcccgtatcctcatttccaacaaaccaatggccgttatcgccgatatgcggtgtctggccgctctcgccggtagcgcctgtgaggaaataccagaaatcttgcaccgtattgttgccggcaggccatttgctgccggggttgtgcggattatccacactgccgtcggcaatcatatccttccactggtcaaaagcactctttccgtctttcccgtcatttcctttaagatacttgaaaaagtccgcaacttccgtccggtctttcggccagtctaccgttccgtccgctactttttctttccaaaactcataggccgaaagcccggtatcacctttaggccctttgggcatggtgatatcaacatcggtacaggcggccatcaacaggcatacaactatcccgtaccattgtacaaatttaaatttactcatctgaatttcaattgtttaattagcttatagtttgtatatactgtttataagatgcaaatggcaaacggatgtaagtttcgggcagcaagaagtccttttatttcgtctgcaaaaatacatacacatttacaacgcatcatttcagataaaagacaattaatttcccttttcggacaaaatgcccgaaaaaagaataaacaagcggtaaacatctgtttcacacccatatatactgaaacagatggcagttgtccttactctccatgatgcctttccgcttcaatgccgaatacaagtcctcgcacgatttcatgcctatgccgtgcagctttgccaaggcattgaatccgtttttcttgacgaagcgcagaaggtcttccagcagatagatgttatactccctgagcctgcgcaggattctcggagttatctcaagcactgccagaggcgtcgacagcattttcaggtattcaacggggatgccccgctccttgaacggtacgacaaccctcaccggagtacggtcgatgttccttttggacagaagcgaccggcagttcctgtatctcaccctaattgcctgaagctcctgccgttcctgcgccatggcatcccaatcgtccataatctcttctaccgacctctcatacatagaggccagctcttttgccgaaaggccgtatttctccgcaagttcctgcatgccgtctttccttgtcagcagcgagcagaaaatatcctgctccctggggtcttttatctgcatggacatcttcctgacaagccgttcaaaactgtgcatgcagtggtttttcttctccattaaatatttcatagtgttacgattgttttttgatgtggctctcctcgcgcaggtgggtcggggttgtgccgaactgtttcttgcagtagcaggtgaggtgcgcggaagagctgaaaccgaactccctggctatttcccggaaagcgatatccgggttacagattttctcgtggataagttcggctttccgttcctgcatccactgatagggactttgattgaaatagtgctggaacttccggttgaaggagcgttccgaaacgcagcacagactggcaaactccttgacggtctttaccttccggtaattgttcaggatgaggttctcgaacttgcttcctattccggaagcgccggcaaaaaagccagccagttcgtttttggcataaaagccgcgcagtatcagaatgatttcctgctgtttaagaatatgcatgtgcctgcacagcagtcccgtttccagatagaacagcacctgcctcaaggcatgaagcagtggtttacggatgggcagggtgtggtcgttggtggcaataggtttctcatgagaaatggaatcgaaatacatcttgtcgcacaccgttatttccttgttccagaacagcaggaggcattctgccggggtgatgcccgtcaagcggttctcttcccgctgaggtatgagcagcatcctgttggcatgcacggagatggtatgctccctgcccagctctacctgcacctctcctttgagcacgaacagtacacagaagcaaccgtcattatcaatccggccttcttcgtgtgcagttaattcgtaccgtgaaaatccgctttcatacctcagttgataattgaagcaggaacgatgctctgacaaataaaataatctcattgataactttttaatttatacgccataataacgcatcgcttttttagattgtttttcacaaaaaagacatttatttataaatttaagactatcgtaaggtttcgcagggttttataagtatttgaaaggtgtattgattccgctcattagcagcaagatggctgccaataaagtcaaagcaaaagattatcccgttccaccgtggagtagttttcattccaccatggtggaacaaaaactactccgtggcagaacaaaactttctccacggtggaacggattggttcttgcatgctttctgcctgatacttatagaggaaacactcgaagatgcgctttggagggaaagataatggctgtatttattatccccataaatagggattgttccattatggaatactttgtatctttgccgcaaaactaaacggatgaaacaaggatgcctgaaaataatgagatggtttctgcctgtactatttatatcgtacatggcaggtatcacactctttactcactcgcatgtagtgaatggggtgaccattgtccattcgcacccgtttaagaaagactctccccatagtcataccacagtcgaatttcaattgattcatttgctgagccacgtggcgactaccggagccggtatcttttttctctcttttcagtttattgcttatctgctctataccctttcgtggcgtccggatagggcaggatactgttcgtccgtcgtgggcgtggtatctttgcgggcacctcctaccggaagataaaacctctctctcactgcattatttagaaaaatttatttagtaattctactatccaaaaatgaaaatgaagaaatatatatttttcctcgttggcctgtgctgtgccctgttgcctgctatggccgaccaaccggagctgctggaactgaaagcgtctgatgccaatattatcggtcatgtactcgataaaaaaacgggtgaacacctctcttatataacaatcgccctgaaaggaactaccattggtacggtgacggatgccaccggacactatttcctgaaaaaccttcccgaagggaattttgtgctcgaagccagttcggtggggtataaaaccatcagtcgcaatgtcagtctcaggaaaggaaagacacttgaagaaaattttgagttggaagaagatgccgtggcgcttgacggagtggtggtatcggccaatcgcagcgtgaccaaacggcgcctggcacctacattggtcaatgtggtagatatgaagatgtttgagaatacaaactcgcctacactttcgcaggggcttaacttccagcccggcgtccgggtcgaaacgaactgccagaattgcggtttccagcaggtgcgcatcaacggactggacggtccgtatacacagattcttatcgattcgcgtcccatcttcagtgccctttccggtgtttacgggttggagcagattcctgccaatatgatcgagcgcgtagaggtgatgcgaggcggaggttctgccctgttcggttcgtccgccattgccggaaccattaatatcatcaccaaggagccactgcgcaattcggggcagttggcacatacccttacttctatcggcggcagctcgtctttcgataataatacttcgctgaatgcatcgctggtgaccgataatcatcgggcgggactctatgtgttcgggcagaaccgtcatcgggatgcgtacgatcatgatggagacggttattccgaaatgccgaaacttaaaaaccagacagtcggcttccgttcgttcctcaagacaagcacttattctaagttgacattcgagtatcatcacttacaggagttccgtcgtggcggaaacctgctgaaccgtccgcctcacgaggctgacattgccgagcagattcagcactctatcaacggcggcggcttgaaattcgattattttgctccgaatgaaaaacaccgtctgaccgtttatacttcggcacagcatacggaccgcgacagttattatggcagcaaaaaagaccagaacgcctatggaaagacaacggacctgacctttatcggcggttctcaatatgtgtacagtttcggtaaatgccttttcatgcctgccgacctgactgcgggattggagtataaccgggataacctgaaggacgatatgtggggatacaaccgttatacgaagcagacggtaaatatcggtagtgcttttttgcagaatgaatggaaaaacgaaaaatggagcattctcttgggcggacgtctggataagcacaatctaatcaaccacgttatctttagccctcgtgccaatctccgtttcaatccttccgaggacattaatctccgcttgagttattcgtcgggcttccgtgccccgcaggctttcgacgaagacctgcatattgagaatgtaggcggaacggtgtcgatgattgagcgtgccaagaatctgaaagaggaaaaatctcagagtttcagcgcctcagccgatatgtatcaccgtttcggtgcttttcaggtgaacttcctggttgaaggtttttataccagactgtcggatgtatttgtactcgagaacatcggagagcgggacggcattcttatcaaagagcggcgtaacggttcgggtgccaaagtattgggactatcgatggagggaaaaatggcttatctctctttgttccagttacaggcaggagtcaccttgcaacagagccgttatgacgaaccggaaaagtggagcgaaacggcaccggccgagaagaagattttccgtacaccgaatacctatgggtactttacggcaacgtatacgccgatcaagcctctctcattatccctgtcgggcacgtacaccggctcgatgctggtgcagcacatggccggttatattgacaaggatgtggcggtgaatacacgcgatttcttcgatatgggagtcaaggtggcctatgatttcaaactttataagtcggtggacctgcaattgagtgcaggtgtgcagaatgtgttcaatgcttatcagaacgatttcgaccagggagtggagcgtgactccggatatatttacggtccggctgctccgcgaagctatttcgccggaataaagatcagctattaactccattacatttgaatggaaaccgaacttctgttcggtcgaaatgaaaaagagcgtaatgaacggcgtttacgcctgctcattacgctccgaagttataaaatactatttactggttttaggaagttggtttaaaaataaggttggttagttactattattgatattatcattcatagtaccataaccatagatgtaataatcagccatactaaactttccgtcattatccaacgtgacaaaaatgcgggcaccaccgccccattgtgcatcatattcaacatcaaatttttcagttatctccttttctgatgtattttcatccaaaataaggcttaccatacctgttggaactgcatcggaagtatattctttgaagaatttttggtcttttacataagcttcgagatcattaggcttttggtcacttccctttaccatatagactttgctggtattttgtcctttggttacctttaacttggcaaaatatccccaaccgacctcttcatcatcaccgcttgacacaaccgtcaatgtcaatgctccattacctgagaagtcagcttctttcggtgcttccacctctgccgctttagtctgaataccatcatcgcctttaccagccttagccaccaagtcaacaatctcactcagcttaccgtccttatcaaccgttacagctctcaagtgataagtagaacccggacttaaaatatacaatccgccgttgttttcctcagttttaagtttgcccagttcttctactttatattcagtccactgtacattgctggaagcttcatccaccattatccaatcaaggttagcaggaacagatgtttcccagaatacacgaaccgctgtcgtattttcattgacactgatatctacaagcagtttctccggagatgtctgttcggggaagctgacacttgtaatactacctactccctcaaaagtaggacgtcccgttgtaactccggtataaacaatcttaccaagcttgccttgcttgtcgataggtatggcatatacataatacttggtattaggaaccatatccttgctggcaaactcttttgagaacggttgagtgtatgcaacaggaacgcttgcacccaacttaagaatgctggcttcgatttcggctacagacatctctgcaaaaggcttactactgtttttagcaatagcacctgcatctgtctgtcccacaatcattttggcacaattggcatctgccgtaaaggtagcttcaaagcttctcaaagcaatcttaccggcaggaatctctatgcttgccaccacttgtccgttaagttctgcatcgggcacagtgacttcttttgtaaagaccgttcccttaccctctgcatctaccgcataaatggcaacaaccacctcggtttcatctgtttccaatgcggtcagaataatacccttgctttcactgatatccttatcctgcaaagcacttcttaccaatgtctgttcattaaacgtagcgcttacgtccgaccagttgtagggctgcataggataatccttgttgggattcaaagaaagttcagcactttcaataaattctgcttccttgtagatttcttcatacttatcctgtccggtttcaaggtctttacccatatatccctttataattgccccaatcacatacttggcgcacttagcccctttcttcacctctacatccatagagaaagcggaaaggttcttgatttcaaattccaccaattcgtccatcaggtcctcatacttgaatatgaactccttgacagcttcctggctcttgccgctctcattctcggcatagacagtcagaacataatccttatctatatcgatggggatttccagtttagtctcttccttgccggttacagccgtatatgcggcagcagactcgcctttcggttcgcacttccagtaccatttttccgtatcaccggaagggataacggttactacggctttggtattgtcggcgctaagagcaggttcgctcaccgtgatagtaggtaaagccggcttttccggtgtcggatcgtttttgtctttgtcgtccgagcaacttgtccatacgcaagcagccattgccagtatgggaagcattgtcttaaaaatgtttttcatacattattaattaattagttaataaatagagataaatactacaagtagaaaacagggagataatatgggaaaaacaaagaggaaaaagagagagttaccacactgttatctttttgcaaaattataaattatttataaaaacaacatagaatatatattttttttcagaactttttctatatttgttgcaaatatatccaaagaaagttttaaacaaagggctttttgtaaatataaaattaacattattacagcattcttaaaagcagacaaacaacaagcaaccccgatgttatcctttaattggactgatattatagaaaaacgtaagcaaacaaaactgtaaaaaaaataaaaggacggcaatatacactttaaaaatgtctctttccgctccagactaaaaaacagaaacattaagtattaatcaaatcattagaagaacaaagatgagaaaatcaattctcttgtttgtgcttttaactctgttcggaatcccgtacctattggcacagggcggattccggattacaggacaaatcctatcggcggaagacaacctgccggtaatcggagtatctgtagttgaaaaaggcacaacaaacggtgtaattaccgatatcgacggaaattacagtatcacggtaagcaagtctcccgccaccttgcagttttcgtacgtaggcatgaagacggtagaaaagctgtttacagcggcaacccgctacaatgtgattatgcaaccgaacaccgaaatggtggacgaagtggtagtagtggcatacggcgtgcgcaagaaaggaaccatagccggctccgtatccaccgtaaaagcggaaaagatggaaaatgtgccggcagccggcttcgaccaggcgttgcagggacagacaccgggattgtcggtcatctccaattcgggagaacccagcaaagccgccgtgttccagatacgcggcacaaactcaatcaactcaggcacatcgccgctgtttatcctcgacggcgtgcccattgcaagttcggacttcaacaccatcagcccgggcgacatcgagtccatttccgtgctcaaggacgcctcgtccacctctatctacggagcacgcgccgccaacggcgtagtggtaatcaccaccaagcgcggactctccatagacaaggcgaaagtaacgctgcgcgcgcaatacggcttctcgcaactggcatccgacggcaaatggaccatgatgaacacccccgaacgcatacagtttgagaaagaaataggcctggacaccgggcaggactacgacctgctctcacgcaccaacgtcaactggctgaaagagatattcaacgaccgcgcaccgttgcagaactacgaaatctccgtgaaccgcgccaccgaccgcctcaactactacgtatcgggcgggttctacgaccaggacggtatcgcccagaactcttccttccggcgctacaacatgcgcgccaatgccgaagtgaaagccagcaactggctgaaaataggcacaagcaccatgtccgcctacgaagaggtgcagcaggcggaagagggggaaatggcgatttacacgccgatagccggctcgcgcttcatgctcccctactggagcccctacaacgcagacggctcaatagcctcggagaacaacggcacatggacgggcacgggacagaaccccatcgaatggatggcgaacaacccggtgagctataagaagtacaaggtactctccaccgtatttgccgacatcaccccgatacagaacctgaccgtacgcatacagttcggcgccgactactcgcacgccaccactttcatgcagtcgttcccgagctacgtcattaacaacgagcagggcactgccggacgcaactcctcggacgtgctgaaactgagcgaaaccgccactgccaactaccgctgggcgctgaacgacgaccactccttcaacttcatgctggggcaggaagccatggactaccagtcgagcggcttccaggtagtgacgaaaggacagtccagcgacttcctcacgaacatcagctccggcacgcgcgcctcgtcctgggacgacaccaccagcgcatattcctacctctcgttcttcctgcgcggcgagtacaactacaaagacctctactacggcgaaatggcactgcgcaccgatgcctcctcgcgcttcggcaaagaccaccgctggggtatgttctggtcgctgggatttatgtggaacatcaaaaacgaatcgttcctgaaagacaccgaatggctgacaagcgcgcaaatcgcactcagcaccggtacttcgggcaactcggagataccctactacgaccacctggcactcgttgcgggcgggccgaagtataacgacgaagccggtatctaccccaaacagagcggcaacgaagagctgagctgggaacagacctggtccaacaacatcgggctgcgcctgggcttcttcaaccgcgtcaacctcgacatcgacttctaccacaagaaaaccaccgacatgctgatgtccgtacccgaaagctatgccattaccggcgagggctaccgctgggacaatatcggggcgatggtgaaccggggcgtggaagtgtcggtcaacagcgacatcatacgcaccaaagatttcacctggaacctcaacgccaacgtgtcctacaacaagaacaagctggtggaactgtacaacggcgtgcaggagtacgtaaactccaccaccggactgaaattcgtcgtggggcatccggtacatgagttcttcctgaaccgctatgccggcgtgaatcccgccaacggcgacgccctgtggtacaccaaagacggcgagctgaccaccgaattcaacgaaagcgacaaggtgatgaccggcaagacgttcgattcgccgtgggcgggcggcttcggcactacctttgcctggaagggcctttcgctgtcggcacagttcagttggatggccgaccgctgggtgatgaacaacgaccgcttctttgaagagagcaacggactgtacagcacctacaaccagtcgcgccggctgctgtacgaccgctggaagaaaccgggcgacatcaccgacatcccccgctacggtgtgacggcgcaactggacgaccgcttcctggagaactcctcgttcctgcgcctcaagaacctgacactggcatacgcactgccgcagccactgctgaaaaagaccaacttcttcacctcggcacgcgtgtacctgcaaggccagaacctgctgacctttacgggattcaccggactcgaccccgaaatgtcgagcaatatctaccgggcacagtatccggcttcgcgccagtttacgctgggcatcgaagtatcattctaaccctatcaagcaaaagaaagatgattaagaaattcaaactatatatcatgctggttgccgtggcgctgtcgtccgtctcctgtctggacaaaatgccggaagacggcattcctttcgacgagtcgctgcagacggtatccgacataaacctggctgtcataggtatctacgacgctttcaggagcaaatacctctattcgggcaacctgacgctgctgcccgacatacagaccgacctggtgtacggagtgaacggcaacaccaatgtgtacggcgacatctggcgctggaaagaaatcaaacccaccaataccgacatcgaagccgtgtacggtgcgttgtacgatgttatcaaccgctgcaacttcatgctcgaccgcgcggacgccgtgcggaaaaagaccaccgacgacaaggatctcgacaagctggaccagtgctgcggcgaggcttactttgcccgtgcacttgcctactcggagctggtgaagctcttctgcaaggcatacgaaagcgatgaggacgccgccggccagttgggagttatcctgagcgaacactatctgggcgatgaaaccatgaggcgcgcttcgctgaaagactcctaccaatttatcctcgacgacctcgaccgtgcggcagagttgctggaactcgaagaggacttcgacaccgacacgcagggaacgctgtacgacagcatctacttcaacgaatatacggtgcatgccctccgcgcccgcgtacttctctatatgaagcggtgggacgaggccatcaagtatgccaccaaagtcatcgacagcggttactactacctgtcgagctgtacgcgcgcagccacctcaagcgccagctactacaagtatatgtggacgaacgacttctccaccgaagccatctggaaagtgggctttaccgttaatgcctacggcggcgcactgggacaggtattcgccaactacgactacagcaccctgcgccccgactacgtgccggctacatgggccgtcaacctgtacgacatgaacgacctgcgcgtatccgcattcttccagagcttcaccaccggatacagccacgggcttacatggccgctgctgataaaatacttcggcaacgaatcgttcaccaactacaacatcctgcacgtcagcatgccgaaagtgctccgcctgtcggaacagtacctcatccgtgcagaagcatacgtgcaacgcgaccagcccgactacggcaaggcgggaagcgacatatccgtactgcgcacggcacgctactcctcctacggcggctccacttccctgaacaaggagaacgcgatggacgtcatcgaacaggagcgcgtaaaggagctatacatggaaggcttccgcctgcacgacctgaaacgctggcacaagggatttgaacgcacgccgcaagaccagtcgctgtccaacggcagcagcctgaaagtggaaaaagacgacccgctgttcgtatggcccataccccagcacgagctggatgcaccgggatcggaagtagaacctaatgaaagtaacaaataagccaaaagatttatgataatgaagaaactattaaccggatgtatggtagcccttgccatcctggcagccctggcaggacttgccggatgcgaccaggacaaggtgctgtacagcggacgcaactacctgatgttctccgatacgctttaccactatgccgtacaggagagcaacgagaagttcgaagttcccgtatccgctaccagacgcgccgactacgaccgcacgtttgccgtggaagtggtggacaaggaaagcaatgccgtggaaggaaaacattacaagattctttccaataccgtaaccatcaaggcgggcgaaaccgccgccaatgtcgagatagaaggcgtgtacgagaatatcggcatcagcgattcgctgggatttgccctgcggctgataatccccgagaccgaacagtggcacaaatacggaacggagaccaaagtggtgatgcagaaagtatgcccgttcgacatcaatgcctttaccggctattgcaaggtcacttcctcgcttttcaatacctatatgacgaatacgaccctgcgcctgataacgtccgaagtcgtggaaggggaagagaatacgattgtactgcacggactctacttcgacggatatgacaccaagctgaaattcaactacgacgatttgctcgaacccagcatcgaaatggaagaacacgtctgcggcagcactgccgaactgttcgacaccacacatggcaacggcaagctgatgatgacacagccgtcgggctatcccgcctacttcagcacgtgcgagaagttcgtgttccactacgtcaacatccgggtagacaacaaggacggctcgctggtgggcgtggtggatactcccgccaacatcatcgaatggataagcgaagcggaagccgaaaagctgaaagaacaaggatattaactttataacccctacaattatgaaaataacagaactgaaaagcatgagcctgattatggtgctcgccatgatgataatgacagcgttcaccgcctgttcggacgacgataacgaaggcaacaaaaccgttgttttccctgagcttgcaaacatcagcagcgcagccggagaaactaccgaactatcttttgaagcatctgcggactgggaactctccagcaatgccggctggtgcaaattccagaatggcgaattcctggaaagcctcatctacggaaaggccggaaagcagaccgttaccattatgacctctgccgacggacagaactacaacgaggatgccgtagcggaaatcacactgaaaatgggcaatgcctcgcaggtaatctacaaggtgacgcgcgccaaaagagaatatgccgacctcgttgtcagcgatgaagcaggcaatatatatgaccggacgcacccgctgaccatcaagggcaataccgctacctcacccgtctataccgttatcaaggcacaggcggaaagcggcgtgaaggtaggcttcaccaatccggaatggctgagctatgtcatagacgaaaaggcgggaacgtatcagtttacgttcaatacggcaaacacgagcggactgaatcccaagtatccgattaccggaaacagctataccctgactttcgttaccgaagacgccacgaccgccaaaacggacaaggtgcgtaaggtggagattcccgtcgtgtacgaaggactgcaacgggacgctatcggcatcagccccacgtatctgaacgcgctggcaagcgtgacgggagaagagctgtcggacgatactggaattctggaacagatgcaatcgaccgttaccgtatataatgatgaattcgagactgtggtattcgccatgaagaaccaggacggtgaattcagttatgatttcaacagtacggtagactggctgcacgccgttacaggaacaggcagtaataaggataaggtaacggtcaccgccgaccttaacgagaatacggaagagcgagcagctaccgtcatggtattccctaaagccgtttatgatgaaataaagagcaactgggcaggcaacctcatcgacgaaagcacgggagacatcaagtccaactatgcgaacaatgtcatgaccaatatcacacaggaagcctggcagaaacagggtgacagaattaaattcaaagcgctgtttatgtatgcgtacgattacgaccagaccgggttcagaaacatcaaggacttctttgaaggcactgttatcaaatttgaggacttggagaattcggacggtgtcggcgaatataatgtaaccggcaacaatgtatggaaagccaccatccccaaaagcctgctcaagaaattcgacgaaatcggagaaccgggacacggtccgggaaaaatcattttcgagcccgttgaagcggctaccgaccaggaaataacggaaaaagcctctcatgcaggtatttcatccgaaaagatgtcaggtcaggcatggtcacaggacgcacgcaaactggtacgtatcaacggaataggtttctgcttcgacaacaccagctatgaaacatacgccaacgattaccaactggtggtcaagggcgaaggcgaagagattcttgcactctgcatcgtagaagtatttgacgatacacaaagccaaaccaccttctgacggaatatgtacaagcaaccactgtaactcaaactacagaaaagaaagaataaatgaactcaaagagaattataaaaggaaaactgtttcttgcagcacttgtcaccatgctatgcggcatggtggcaggcggatgctctgaagacaaggacgaactggcgggcaaacaatacggccacgtacagttcaggctctacaagtcggcatcctatacgcaggaagagacaacccgggccggcacggcatctacgcgtgccaccgcaatggaccggttgagcgacgcccagaaagtggaaatcgaaatgcagcacaacggtatgagcatcacccagaccctcgtgctgaacgcctacaacgagagcaacgccgaatacggcatgagaagcgacaaactggagcttctgaccggaacgtataaaatcgtaggctacaagctgctcgacaagctggacgaggtgatcaccggcatatctcccggtgcggacgagacgtttgaagtcgtttcgcgcggactgactaccaaagaccttgttgccgactcgcaagcgcggggcatggtgactttcaagctgataaagtccggactcaccacacgcgccgccgacggtgagagcatcgactatctgttcagcgacataaaggttatcgacgtaacggtgaccaacacgtttacacgcgtgcccgtcactatcaagaacctgaaagtgacttataaggaagagtatgaagaacatccgaatacggactataccgacgacaacaagcacaaagacaaatataaggatatcggtaccgccaaatgcgactcggcagtatggctgcccgccggcacgtatcaggtaacctcttacaccatttataagaaaagcggttcggtaacctctacgctcgactccagaagccagcttgcgggagagatgttcagcgtagaagataacagacagacggacgatgcccttgtgcccatccaactgtcgccgacagccgcttacatcaaggactacatcgcactgaaagccatttgggaagcgctcgacggaagaaactggcactataccggagagacaagccctgccggagcaacctggaacttcaataaggaggtagacatgtggggcgaccagcccggcgtgtcgctggacagcaaaggacgcgttatcagcctgtctctcgaaggcttcggcgccaaaggcagagtgcccgacgccatcggccaactgaccgaattgaaagtgctttccctcgggtcgcacaacgaaaagctgggcggcagactgttcggcgcaggcggaataacgcccgatatgagcgatgcacagaaacagaagatgcgcatgcactacaaggaactgttcctcgactacgaccccagggagaatatgtcggaactcctgcaggacggcattaaccgcgaccccgaaatggcaaagataaagaaaagcaaccgtatcagcatgaaagatatacagataggccagacaaccaacaacattactttcatatccaaagcggtaatgcggttgaagaacctgcaacaactttatattgccaattctcccattaaggctgaggacatctgcacagattgggaaaacgaaaattccgaatatgccaagtcatttaaagaggaaagcagctcctgggcatggagaaccctgaccgacctgacggacgtagaggtgtacaactgccccaacctgacgaaacttccggagttcctgtttgaactgcccgaaatccagttgctgaacatcgccaacaacaaaggcattgacggactgaacggagcaagagacggaagcggcgagcaactgacagccgactggaagaaattagcggatgcaactgtaggagccaaactccagattctgtatctcggcaacaacaacctgactaaatttccggaacacgcatcattgaataaaatgagaaaactgggactgctcgactgtatcaacaacaaccttacaggaaagctggaagcctttggcaaggaagtggaattcactaccctgactctggacaacaaccaaattaccgaaataccggagaacttctgcggtttcaccgagcaggtagaaagcctgagttttgcgcacaacctgatagaatacatccccaatatctttaacgcagaatccgtctatacaatggggtctgtagacttctcgtacaaccggataggacagaatgacgggaaaaacattaattgcagcctggacgacttcaagggaattaacgcctcaacgatttctttgtcgaacaaccttatcagtaagttccccacggaactgtttgccaaaggttcccccatctccaccatcgacctgagcaacaacctgatgacggagattccgaagtactcgctaaggtcggaaactggtaactacaagaacacgtatctgctgaccgttatcgaccttcgcttcaacaagctgaccaagctgtcggacgacttccgcgcaaccacgctgccttatctgaagaacctcgacctcagttataactgtttctcgaagttcccgaccgaaccgctgaacagcagccagttgcaagctatcggcatccgcttccaacgcgatgccgacggcaaccgcatattgcgcgaatggcctacgggaattaccagttgccccagccttatacagttgcagataggctcaaacgacatccgcaaggtaaacgaaacgctgacatcgcaactctacatcgtggacatcaaggacaacccgaacatcagcatcgacgtaacaagcgtatgctcgcaaataagggcaggcatgtataaactgatttacgacaagactcaggatatccgtggctgtgatgctttagacataaaacgataaaccaataagattctaccaatgaaatatgtatataaaataatgacggggctggctctcttcgcagggctggcaagctcgtgcaaagacgacgacgcaagcatccccggcggcattgcagtggataaggaagagataaccgtagggcccgaaggcggaaccgaaaggattacggtcaactcttacaagaactgggtggccggagcatccagaccgtggatcgccgtatcgcccgcaaacggttcgggtacggcggaatgccggcttgccatcgactctaccttagagaacacggcacgcacctcgcaaatacgctttgcactggaaggccaggaatccaaactgataaccgttacccagttcggtttcgggaaacaaatcatcgctaaagaaccggatgtggacatcgaaagttcggcagcttataacaaacgccttttcgaggctgtcatatccagtaacgtcaacttcctgattgataaagagcatatcgactactcctttgccgaagaagagacaatgaccaatgaggataaagcagaattcggagccgaccggacaggctggattacccctcccaaagatacggacctgaaactgaacctcgaccggaaagcccgtccgcgtacggtcaaggcaaaattccgctgggaaatgaatacgactccctacacccggatagcgaaaatacgctttgttccgcaaaatccggatgaggaccagttggtggacgacaacggcaatcctatcgaagctttcattctgactgtgacccaaaaggcagctcccaagattgaggacaaccgttcgggagactcgctggcaatcattaccatcaacgagaagattcaaagcatgatgtccttcgatacaagtgagaatatgcagaactgggataacgtaaccctatgggaggcaatcgacaaggatgtacccgaaggtgcggtaggacgcgtgcgttccgtcaaattctccctgttcgacctgcaggaaggtgaaacactgcccaaagaaatacgttatctcaaatacctggaatcgctcgacatccaaagcaactccaacaatcagatacgtatcgtagcgttgggcgaggaaatctgcgaactgaaatacctgaaatcgctgagtgtatccgcctatggcatgaacgaactgcccgaaaacttcatcaagctgggcggcaaggcagacaagagttatcgcggactggaaaaactggacttgtcgggcaacaacttcccgtcgctggctgccattaccgaagtggtaaatgaagaaaacttcccgaatctgcacgcgctcagccttgtcggaaaccgccggagcgactcctactccgacctgagtcagggacgtacccacaatggaagggaactcggtctgtacatcgacatcagtgccggagcggaaaaggaagcattcctgcaactgctcacttgggacaagctgagaagcctgcggttctcgtacaacttcattgaagggacattacctacggatgaagaggtagataccgcactcgaacgggcaaacaaacccaaacgttatcaggacgacgacttctccgacaacaaggaagagtacaaagacaaactggtaggcgatacctgcatctggctgaaaacgagtgacaacgaagtcacattcaccgaaactggcggaaccaccctgcaagtgaaaggacaggatgtgccgcgcgtactgccgaaggcacgctccttctccatcaacctgaacttcctgaccggtccggtgcccaaatggattctgttccacccgtattttgtagaatgggaccccatgacactgctcttcaaccagcaggaaaacggcaagaactccgcaggattcaaagtgggattcaataacgtcgatgcggtgaagttcaactttgagtattactacggcaaagagaagccggaaggtaccaaagtaaacggagtagcttatccgctatactattacaggtatgtggcgggagtcaactaacccccaaacaggtacttattaacaagataatattaaacagaaacaatgaagaaaagattcttatacatcgcactcattaccctgacgctaggcgcctgtacggaacaggatatcgtcgaacagccgtccatccccaccgacggggggacggaagtccggcttcccgccgatgtcaactcgggtgaactgctgattaagttcaaacccgaaatgaccgacatcctcgaccgtacaatgacccgcgcagcgggaaacggcggagtgatgacccgttcgggcatcccctctaccgatgaggtactcgaaattctgggcggataccattttgaacgtatcttcccggtagacagcaaaaacgaagaacgcacccgcatagccggccttcacctgtggtatcaggtgaaattcgacgaaggtacaaacttgcaggaagctgccagacggctttcccaattaggagaaatctcaaaggtacagggcaacagccgcatcaagcgcgcctacaaccccaaaagccgccggagctatgtgagccaggcagccctgcaacaacgggcagccacccgaagcggagtagcggccggaagattctccgaccccggacttgcctaccagtggcactacactaactccggcaacaatgctttcgacaagacaaacagtacgggagaaacccttgccggctcaatagccggatgcgatatcggctgctacgaagcatggcagaaatgcacgggcgacccgtccgttatcgttgccgtattggacgacggagtgatgtatacgcatcccgacctggcaggcaatatatgggtaaacgacaaagaggaactctatgccggcacggatgccgacggcaacggatacaaggacgacagatacggatataacttcgtacacaataccgcggccatttcgtggacggatgtaagcgacatcggtcacggcacgcacgtatccggtacgattgccgccatgaacaacggatacggagtctgcggcattgccggaggagacggcacgaaggattcgggcgtgaagattatgatttgccaggtattcgccggagaaaacagcgtgagcctgaacggagaagcccaagccatcaagtatgccgccgacaacggcgccgtcatcctgcaatgcagttggggatacaactcctcggaagcgaacgaagtggaaggatacgctcccggaccggctaccgaaaaggaatgggcggatacttatccgctggaaaaggaaatcctggattatttcatcaacaacgccggttctccgaacggagtcatcgacggcggtatcgccatctttgcatcgggcaatgaatatgcgggaagcgcctcctatccgggagcttactccaaatgcgtaactgtaagcgcggttgccgccgacttcaccccggcatcctacaccaacttcggtccggaagtggacatatctgcaccgggcggtgacactgaatattataacgctataggggaagaggacaatgagttttgggaaaacaatgaggtttccggctccatcctttctaccatgattcggaacggaagccctgcctatggttatatggacggcacttcaatggcatgccctcatgtatcgggtgtggctgcattaggtctgtcgtatgccgtgcaacagcgccgccatttcaaggcaagcgaatttgtggcactattgaaagagtccgtaaaaccggttgataactggtatagcggcggaaagaagaaaacatactaccgcaaccataactcaccggctgccgctccctccgtcatggagctgtccaaatacatcggcaaaatgggcacgggcgtagtggatgcaggaaagttgctgaacaacatcgaaggaagcggttcggatatgaaagtgccgaatgtgtacgttgccgaaggaggcacatcgaccgtgaaccttgcctattactttgtaaacggtgaaacgctgacctatacctgtacatcggacgatgccgccgtggcaacggtaaccgtcggcaacagcctgatggaagtaaccggcgtaaaaaccggcgccacacacatcacagtgaaagtgagcaacggaagcgaacagacaatcaccgttaccgtgcgcaagaatgccaacgacaacggctggatgtaatttaatgtaattgattaatgaaactaattacctggatagtgctattggtatttgcccgttccccttggcagcaaaaagccgactcgctgataaatccgccactgatgcagcaggcggaatccatactgcgtttcgacaaaagcacgctggacatcggaacgctgaccgaggatgatgctccgcaggcctaccgtttcacgggcaggaacatcagcaaggaagccgttaccgtcacaaaggtacggaccacctgcggatgtacggcagcagaactgcctgccggaaagatactgccgggagaaaccgctacgattgtactgacttatcatccgaagaatcatcccggaacgatagatacggacgcgttcgtctatctgtcctgctcggaaaagcaccccgtagcacgtctgaccctgaccgggaatgttcttcccggagcggatgaatgggcacgctacccgtatgcaatgggccgactgagactgaaacagaaccagatggaatttcaggaagtgatgcccggaaagcgaccttccgaacggattctatgcggaaacagcggagacaagccgctgcgcctgtcggcactcgtcattccgaagttcgcaacattccggacggaaccggaagtgatacaaccgggcagtgaagccgacatcgtggtaacggtagacgcttcactgattcccgccggaaaggaaaagacattcacattcccgattatcatcgaaggagtggatgcccggccttcggaccggaccctgaatataaaagtaaactataccaagtaacgataaaaaacaagaaacccgatatgaagaatattttcaaactaacggctttggcagtctttctgtgctgccttgtgtcctgcgatgacgatgagccgataataccgaccctggaagtgactcccgccaacctgaacggcacgtgggaactttccgaatggaacggaactccgctggcggaaggtacatactgctacgtggttttcaaccgcaaggaacagacttttgaaatgtaccagaagttcgacagcatgtacgcccgctacatcaccggaagtttcagtatcaaaaacgacccttatctgggcgccgtcatcagcggagagtatgatttcggcaacggtgaatggaacaacaaatacatcgtgaccgacttgatggaaagcggctcgatgatatggacggcaaaagacaacgagaacgatgtaaacaaatacatacgttgcgagaaagtaccggaaaacataattgcggaagcaaaagtggacaagggcgagtaaagcagaatttcagctttttttttcataaatttttactctaacaattatttgtggggagtctgtgaggattccccacaagtgcgtttgcactaatccttcatatgcttcttcaaaaccggatacaacacttttgcataacgcataaaacctaaatccgtaaaatgaacaccatctacggtagcctctccatcatggccaataatatcttcggaagagagcaggtagatgttcttctctccccgcttcttcagagaccggaacacagcctgcaaagtctcgttcttatccttcacttctctggctacggtcctgttaaaacgggaatgggtaaatataggctcctccacaaaaagtacaggcgtatcaggatgcttgctacggataatggaatagaacgcaccggcacgttcctttatctgctccacactggcattcggaacaaaatcaagtacaaatacggatgcatccacacccgccatcacatgggcaatctccaaatccaataaagcattgccgctaaatcccagattgatacattcccgattgagccaacgctccaggatattggtatgcgccatacccggacgggaagcgcagcctccctgcagaatgcttgttccgtaaaagacaaccggcttcttacgtaccggcagttccgttgccggcccgctgatttgagacagcgaatcgatgccgatggaaagagaagtcaccccgtcgtataaagaaaggaataaaagatattcacgctcttcgggaagcatatccttcacgatggtcgcctcattcacctttccttgcggacgcccgcttccggcaaacagccacttcccgtcttgcaggcaatacaaatcaagccctttaatgcccgtaggggtcatgtgattcatattcctgttgagcagtacctcccatttggcggcaatccgggtggaattggaacggaaacgtacggcaagcccggcactgttacgtcccaactcccatagaggcttacgggagatattccgtaaagagtccggcaaacgttcgtagcgtgtaagggttgtctcggtagcttttcctaaaagaggaaaagcggaagcgtcgtgatagacgatttgtgcattggcggagatagccaacagcaggcacagaagaaaaaaatttgttttcatagcagttaaataatatatggaataaggatttcggagactgaaactcaagtcttctgtcccttattccatataaactttattatagatgatgttaagaatccgtttgaactttgttcaaaaagtattttccgaaagtgaaaagtatcatttcttttcagcctgcgcccattctttagccccttgctctttcagcttggcagtaaacgcctttgccttttccatagcagcggcttcttcttcgggagcggcataagcatgcttataccctttcaccacgttccactcgccacgggtaaagtcgggaaatgccaccggagcgcaattattgtccatggaaagttctcctaactctgccaggcagcaccactctgccaaatcgtatacatccatatccaaaggcaaaccgttctgcaggcaataaaccaggcggctatccatgataaagtccataccgccgtgaccgcccacttcttttgccatctcaccgtatttcttcaaaataggatgctggtatttggctacaagcgcttccatttccgcttccggcaagaaaccgtgcgagttcaaatcatctaccttaggctgtacccccgaagcagtcagttggtcggcatcgagcgcatacccctctacgggatacttattggcaaatcctttcgaaccggtcaactgatacagacggttatagggctggggagtcatcacgttatgctgtatctcgatcaccttaccgttggcggtacgaatcagcgtggtggtatggtcgccattgcggaagccattgcaggcagagtccgtccttgcctcaaccagagcctttcccacaaccgatttggtatccatggcaaccagtgtctgcatacggtcgccgcggtgaatgtcgagcgcctgtgccacagggccgagaccgtgagtggcatacacatcgccgcgatgcttcatgttgtaatccaggcgccagcccagcttgtcgccctcgccgttcttccaataatggttccagaacggactcaagttatggatgtacgcaccctgcgcacggattacctcaccgaatacgccctgctgcgccatattcagcgtattcatctcgaaccagtcgtagcagcagttctccagaatcatacagtgcttgcgggtcttttcactcatgtcgaccaaggcccagcactctttcagattcatggcggagggcacttcgatagctacattcttgccgttctccatagcgcacatcgccacggggaagtgatgcagccagtcggtggcgatatacaccaaatctatatcatcgcgcttgcagagttcctcataccccttttcgccagaatatacggctgctttgggcaaggatgcctgcttcagatatttctggcatgcctcggcacgtccttgttcgtaatcgcaaagcgccacgatctgcgtaccggggatatgggtaaaccgctccacagctccggggccacgcatccccaaacctacgaaacccacgcgcaccacctccattttaggcagtgccagacctatcacgcttttccggtctgccggacgttggggagtttcaacgacaatcgttccattctcccactgccactgagttcctttgtcgtttgtctgcacagtggatgtcggtgaagaacaggcgcataatgcgacacatgcgcccaataataatactttcaagctcttcatgcttctcaaatttaaagttaatcgatacggatacatcttttcgctgttccggtttatttatgtgtctccacaatcttggtaggcgccatttccatattccggcggtcaacctggcggactacggcagcagccagttgcaggaacgcgcgtccggtcacggtattctcgtccaaagcgacgggggtacccttgtcaccgctctcacagatgctttgcacaatgggaatctgccccagcagaggaacgttcatctgctccgcaagctgcttggcaccttccttaccgaagatgtaatacttgttctccggcagttcggcaggcgtaaaccacgccatgttctctaccagaccaaggataggcacgttcaccttatcattcgtaaacatgttgatacctttgcgggcatcggccagagccaccgcctgcggcgtgctgacaacaatagctccggtcatggcaagcgtctgcactacggtgaggtgaatgtcgctggttccgggcggaaggtctatcaggaaataatccagttcgccccagtcggcatcggcaatcaactgtttcagggcattgcttgccataccgccgcgccacagggtagcctggtcggggtctacgaagaaaccgatagacagcagcttgataccatacttctcgatagggataatcaaatcacggccgccgatgttctctgcatacggacgtgcatcttccacctggaacatcttgggcatggacggaccgaagatgtcggcatccagcaaacctaccttataccccagtttggcaagggacacagccagatttgccgatacggtggacttgcctacaccgcccttaccggaagacacgccgatgatgttcttcacctgcggcaacagtttgcccacttccgggcgtgccgcctgacggctttccgtggcaatcgtcacttccacttccggtgaaacgtaagtatgtatcgctgtctcggcagctttcaccatagacttcataaagggatcggtcggcttctcgaagataagcgagaaactgaccttcatcccgtcgatacgcagattgtcggcaaccatttcggcctcaacgaggttcttcttgttgccgggataacgcaccgttgccagtgcatcgagaattaatttaggataaagagtcatgttatttactattttacgatttactattcactgtttgacaaccattgtttatttgccggtctggagactactgcgcttactgcggttgtagctgcggtactcgtccaattctatctctacatcgggttcttgcaactctccgcactgaggaagctggaacttgacgtattttatggtcaggccacggtccagccactgctgttcgtaataggtacggatgccgagaatatcatccaccagtccggagtggtagaggtcgtcggtgatgaactctacgggaagcccgttcttctctatcatgtatttggtgtaggtgaacatgaagttgctgtcggtctttacatggatagtgccgccgtctttcaggaacttgcggtagcgttccatgaagtaggtggacgtaaggcgtttggtggctttcttcatctgcgggtcggagaacgtgagccatatctcgctcacttcgcccggagcgaagaagcggtctatgatttcgatgttggtacgcaggaaggcaacattcttcatgcccgactgcaaggactcggtagctcccgtccacatgcgcgcccctttgatatctacgccaatgaaattcttgtcgggaaacatgcgtcccagtcccaccgtgtactctccacggccgcagcccagctccagcacaatcggattatcgttcttgaaaaactgttgatgccagttacccttcatctcaaacggcacgttgtctaccgccgagtacggatattcaaacacgtgcggataacttgccatatcggcaaacttctctaacttattctttcccattcgtatgtattaaagtgtttctacccgaccggtataattataaaaagtacggtcggcaaagcattggtgaaacaatgcgtatttatcaatgcccgtacaatgacaaacgcccagccgttgcggcaaatggctttcaagggaacgggctatcacatcaaatttctctttctcggtattacggatatggaaaccgcccaataccagtttcagcgaggtctgcggaaaatactcctgcaccgcacggatgatattcgtaatgccccgatgcgagcaggcactcagcacggacacttcagcgccctgtttcaatgccaacgccagttcgtccgtaaaggtatcggcctgtttccgcccttccgtccacgtgaagaagtgttcaaaatgcgtatcttcttcatccgtaacgggcaactgcggaaagacaaacacgccgcggcacaattcagtaacctcatccacaaaacggaaacgggtgctgtccaaagcatcgggctgcatcactccgttttcccgttcatccttgaacttcggccggaagagttctctcttgcagacaacctgtgccttgtcgttcacggcaagaaagtgatgcagtccgccggtgtggtcgcgatgtccgtgcgacagtaccaggaaatccacctccttcaagtcaatcccaagtatccgggcattgcgtatgaaaaggtcggaagctccggtatcgaacagcaggcgatgctcacccgtatcaacaagcagggaaagcccgtgctctccctgtagtcccttgccgtaaaccgaattttccacaagggttgtaatctttatgctcatgcgttattccacgacagttacccaaccgtgcgtatcaggttcgtcaccgtattggatagcacgcaatttgttgtacagcttcgtgcagaccggtcccggttttccgtctttggcaatcacgtacgacttaccgttctccacatcgtcgatgcgctctatcggactgataacggcagccgtgccacaagcgcccgcttcctcgaaagtaagcagctcttcttccggaaccggacggcgttctactttcatgcccatatcctcggccagttgcatcaggctcttgttggtgatggacggaagaatggaagtggatttcggagtgatatacgtattgtccttgataccgaagaagttggcagcaccgcactcgtcgatgtatttcttttccttggcatccagatagaactcgcaggcatagcccaaatcgtgcgctttcttattggcgcgcaagctggccgcataattgccgcccaccttgtagacacctgtgcccaaaggtgcggcacggtcatattcgcggataataacgtacggattggtggagaaccctcccttgaagtaaggacctaccggcgttacaaacacgacaaacaggtattcctttgccggatgtacgcctacctgtgctcccgtacccaccagcaacggacggatatacagggaagctcccgattcgtaaggcggaatgaaacgctcattcagcttcacaaccttaagaatagcctctttaaagcgttccgtcggcaactcaggcatcaggatgccacggcaggtagactgcaaacgcgccgcattctcttccaaacggaaaatacgtaccttgccgtctttgccccggaaagccttcaaaccctcgaacgcttcctgaccatagtgcagacaagtggctgccatgtgcataggaatggtttcctcgctgcatacttccaatgcgccccactgttcgttacgatagtaaatcctcacattgtaatctgtcttcatatagccgaacggcagattagcccaatctagttctttcatatctcgctcgtattaattattcgcttttattaatttcaagactaactatttgcaacaaaagtaatggttattcttcatatttcctaaagaagcggtgttttttacgacataagagcgacgatatgttttttccattacatgccaactatgataaaaagataagcagccagattttcattggttggaactttctgtttcccttaagaataccctaagtttaccctaagtaaactgatagtttaatgcggtgaaaccaacagtttacttaggataaactaatagtttatccgcatgaaactttctctatttaccggaaagcgcccaaatacactgagaatcaattcatagcctccattttacacaataggaaaagctatcgggtcactctttccttgtggagcataacagtgtgacagatatttttcgtttttcaaactttgtgcaggaagcagcaacaagaattaaacggtgtggaaaacgacataaaaaagaccgctacccaatagctgtcggtagcggcctttatccttgttagagagaattaaattatcaaatgcttgttttcacaaatttacagatgatataaaaaatattcctaaaaaagagtttattcacactttcatttattcggataattccttgacagcaagattatcgtgcacctatcgctttcgcccattcagtgtccagccaagctttttgagtatcaggaaacaagtggctgtcaataaagcaactgagtccgcaactgcgagacagcccgatgggttgctgactataagcactgtagaattgtggagtgtggtctgtaaaaatcacagcttctttcaatgccgctttaaaggcatcagtgtcattggtcagtgcttcaatatactgctccaagtcataaaacaggtgtggattaagcccttcataaccttgaatggcagtcaaatccacttgcttgtttcctactgcagttaccacgtttttcacagcagcggccaaagcttccaatttattgctttgtaccagtgcgacagtacccgacgtttgtctgtatttattcataaatgattcgcaagcgcctttcaaatctttttggaagagctgcgatacgatttccttatatgggaatccatcggccagcacctctgtcggtgaagctattaaataatcggttacatttcgcagatcataaagcgcttctatagacgacatgaagcaggcatcgaataacaagtactcgaatttcagtccttcaaacgcctgtgccaaagcaggaatttccatgtattgagtaccgtcctgtccgataaaccgggtgctgggtgccatgacatgcttgtcgaaaatagaactgggcacccagccgctaccatggctggagagtactaatccgtagctgtcagcaggcatttcctccatcaccttttgcaaaacattcttcatgaatacggggtctgtagaaagatcagactgagtatattcttcgataatctgatgcgatgtccggttattctcctcattgatgaccagtttggtcaatgtagaccgtttgccattatcgtagaatacagctacctgatttttgtcggacagacgtatcaggtgcccggcagctccctgaataacgcgcaggttggcctccatttccgtttccaatccggtattgtcacccatgtaatagaaaataagcgtatgcttcttgtcgggcacagagaaagcctttgttgcaatctttacactagcaagcacgttttcttcctctcctttggcagcagccaataccacatattgcgtgttggcatccagttcttctatcaagatatccatcggcttgttggcagtggtcacaatacctttgtccagcacttcctgtgcatcgggcatgatttcgttttcttccattaccaaataagcacagcgcaaggcattggtcgattccaacgtaatgtttacagtggtgtaaccggtctcgccggccgtgagtgtcacggtaggtgttggaggcaatatggtttcttccatcggagtgtcatcatccgaacaggcagtgagagcagacaagcagaagaaaatacctgcaccccattggtataaggttcgtttcatgttcataatctttatattttaataaattatcgttaaattgtctgttgcgggaagtttaaggattaaaattatccaccacgttcaccgtacctttccattctcctgttatttcgtatcccgcatcatcccggaagtcgaatacgaatttataaccgtcgttttctttacttacagtcattgtaccactcttgataggagccaatatatctgtagcccctgtctcatcatcactgcgcttatctccataccaggtatacaagatatctgctttgttgaacatcatgtatccgggaagcgcatacataggttcaaacttatgttctatggtgtagaccccttcctgaagtgtggctcctttattcgcatcagtaaagaattcgatggtaatcatctctgactttatctctttcccttcttcgtctttatctttatagaaatttatttgccaagaactcaatccgggatagaggtattctcccaaataataagcttctatctctgtcagttcttcgggcagagccaatgtgacattgttcttcaaagtgctcatcgggctggcaggcttcgtattgtcattgtcgttaaaattacccataggcaatgccccgctgaaattgcatgttatgttcagaccgtctgcactttggaaattgaatgcaatatcataattttcaccgcttcgtgtcacggtcatggttccactgttcaggaaggcaatatatctcttgcctgttctggaatcgactttctccaaataagagcccgtaggataatattgcccgtttatgtcggaaatttggcctttgttgatagtcatggggatttgcatatatccctgtgcacttcctccaaagatagacacttggtaagtaccttcttccagtggaggattttccatattgtaatctaacaatttatgcatataacagcttgacaattgcaaataatagccattggtcagtacctcgttttcattgaagtttccatgatagaattgcaacagcatatcatcggcatgcggacagaaccagttgccgtaatatcttcctttggctaaagtgaaagacacctcttgatcttccgtaaaaggctggtaagtgccctgtggtgtttccggctcatatttttcaaagataatatcacctttgaagtgtcctcggaaaggctctccgtcttccatgacgatatccatatcaatggtataggtgtcacctttacgctgaacaagtacggttcctcctgtgacgtagctgtaaaccactccattggcagggtcggatgaaatacgggtaaatacattggttgtttccacatcccaacaacctatttgtgccgtctcttctcctgcatgatattctcccgccggcagagtagcgttccaagggtcgctatcggctacattataaagatccaggcgaaccagatagtctccaatattggtcggtaagtcgtcttttcctatttccccagaggccaggcgaataacatagttaccgtttccaggctcattgtcggtacggtaacttgccttttccaataatttcagtttcactacaggtacatcattttcataaaccggttgtgtcttcatttcaagagcctcggaaagtaaatagcgtccttgactcacaacagctgcctgaatgatgtaacaagtttccgcctctaaggcaatagcccgttggatacttgtctcggagttatcggccagtatgccttcgttaagaatatcctccgctgtaggagccgtctcgccttttttatagcacatccaagcacattggtctgcatgttggggtgtgagtgagaactccaatgaatgactggtagctttgatggcgttcagggtagcagccgccggaactgccttttcatcatcggaacatgatgagaaaaacaataccgatagaatggctgataaaatataatatgttagtttattcataacaaacgtctttttaatgtgatttattggggattatccatatcggtaaccttagaagtgaaagtacatacataacgctgtccttccgtatcagtaaggtctatcttaaaggtatatgcttcaccggatttgtcgacttccaccttgcctgatttaaatttacgggtagtgaaaccatacgaatagactgagatttcactgaatttgctgtccaacgttccgacagcgccatcgttaccgacgttataagttccggcgggaagaaccttctcccccacagctgcacgcaaatcaagggttatttctgtatcccaattattgaatgcagccttgagatagaattgtccatctactgcgccgttaggaagtatgcgtttcagttgttctatactattaacctgaatttgcagttcatcgaaaatggcaaatccttttcctgatatttccccctcatacgtagcatttactttgctgccatcctccagtatgaattccatgctgatttcatacttttgggtttccgtattagcattcaatttcattgcaccagattggatacctatcttttcttctcctttcataaagtatgtgtaatcgatattcgtatcaatgcagtatccatcttccgcccctaccacataagtaccgcttttggtatatttataatcttcaccataaatctcaagtgcaagtgtgtagttcccgtcactgaacgtgatatcatcagtacgcccataattggaaccctcggccgaggtaaatgcaacgttatacgtcttgactatctcttgcgcttccccgttgggtttcagcatcaattcttgcagcagatccatggctcccgccaattcgtcattctcatccatagcagctatggctatactcttgatttttaatccgattttctggtccatttgcggagtcaagacccaatccccgttttccagtgcgctgggggctaacgtaaagcttatatccggattcaatccccattgatcgttttcaaagattacgcccaagtagagtttaaagccattagctgtcttcagaaattgtccgcaaggcacgttgagcacaccgtctttaaggactcctttgaaagtaagttctgcattcttgaatgaaacagttacctcattactctcggctataacacttacttcatcctgtgtggcaaatccgtccctattcttaaaatcagctatccaagaacggttgtaagaactcctggaatactgcataaagctatactctttagccaaactaccggattccagcgtcactttacccaatctttccagactttctgtgttctcatcagccaagatgtaatacccattctctgcttcttcgtaactcaaccaggtttgggcttcttcactgatgctcaccgttatcggcatttcactttcaaaacggataaactgtttgaaagccttgttttcggcaaaagagaaaaaatcgtcagtcttatagtttgtaatgatacccatctgtgtgatgcctatcttggcagacgattcgcccatgaccagtgagatggtggctgtacgggtttccatttcgtcgttgggagctatgtagaagcttaccactccattactgcacgccttgatggtacaccattcttcattggaagtagccgtcagagtaggatcagcgttgcccacctcaatggttccatcaccaccaacagatttgaaatcaaccgtagaagacgttatttgcagttctaccggtggcagatattgggtatcgtcatcgttgcaggcacctaagaacaaagagcatcctgcgatgagtagatagatgatattctttttcatattcacttctttttttaatgtttgttatttggaagccgcttgctgtgtaaatgtacgaaagaatcctgtcacataagccaattgcaggacatccttacctgtgttattgtctattgccacaaaagagtcgcacaaaaacttgccccacataccgttatcctgcaagatgacggtttgggttacatcttccaaatggctgtctccagggttgggcgctgctttttcctccatgtaaccttccataccaacaccctgtgtctggctcaaatatcctcctccctgcaaagtccatggtactaagacaatgccatcaggcaacatttggtattccagactgatactaccggccactgcattgtagcgtatgcgcatatcaaacggcaatcctttcataagataactttcattgaacaattcttcttccagtgttacaggtagcatggtatttccttggtaatacacaaaaaagtattcaccgatgtatttctcatagcgggagtaagttttgggcaattctctggcacgtatagttactttatcgtctgtgaagctcatgctaccctgttcccagcgcaactctttcacatccaaggtagctagcgacaacggttcatcgaaactgataccttccggtgtatagtgaaaaggcagatttacctggctgccatcggcattttccaagataaatttgcgataacgctgtgtcactgtgtattgtatcactccgtctatcaccacctcataagcggctggataagcctcattggtaatctgtttaacgctttgcaagtaatcttcccaagctacattctccggcagcggatgcattatcattttgttaccggtcttcttacccttcaacaccacttcgtcagaggtacaggacaagataagaaagtcactgtctccctccatacccataccatcttcgcctatacccaatgcattggaaggctctgagaaaaaatggaatatttcattgtacgtactaaacgtcagcatgggtccggcactattcaccatatcataagcacctgtactcaccttatcgggctggaagagatcgcatgacacatcggcagtgccctctttatgaaagcgtatcagcatagtgtatcccccataagccttagtagcggcaggatagtaattcagcacccatccgttaccggcagaacgcagtacttcctgatactcggcgatggactggttgatgcggttggcggccgattggtcgaaaacatcgtccacttcagaggtacatgctcctgctccaatcaatattaaagccaatatccatagattatatatctttttcatatatatgttcttttagtttaattctgtcaaatcaatatatttcacttgttcggaacggcgctgtacaatatcgcgcaatttgtccaagtcaatattccagacttcattcatgtagtttctcacaatttccatcttttggttaatgaatgtggctccctcatcggctattttcaactgttgttgccaccaggcagcatcatgggtcacatagttcgctaccagctcggcaaagtcctcatgtacttccgaaccaccgtaggccgtaatgaatcccatgcccaaagccgcttcatcactgacattcacccatccgttaccaatatattttccactggacacagcatagaagtcttgcggaaattcgatggtctgatgcaagatgtgtgaaaattcatggtgcatggtactgaaataccagcggttcatcatctctacatccacgctgttcgggttcagagcgttgatattatacagagttactttcaaaccgccttctgccgtacccaaggtaatctttccgttatcataagccggagaacctatcaaatgaatcatcttaggaccatatgtacatataaaatcgcggttgtttccctgaacttctacataggcatcaatccacaagtattttaccaatttggccatggctactgatttggacaattcggccggtgccaagttatagtcggtatccgattccttgtattcgaatttatatttaaaatcgatattataaggggtgacatagttatcgagcaaccattcatcgaatgccgtacggtatggagtcatgttgtcgaagctgctctcctttgtcaggtcatcttcgttgcaagcagtggcaccgccgataagggctgccgccatcagaaaataggttatatattttttcatatgttatcgtattcagtagattatatacttagtatctaggatttggttccatgccggcagtgatgacatcttgtggaagttggatggcgcgtcgcgggtcttcttttcccaacacaatcggactgttgccggcacggttgtgcgaaaactctatgccatagcgtttcaggtcaaaccagcgaagtccttcctgcatggtttccaaacggcgcagttgcaagatgagttggataagattctcttccgtaccgggctctacggtaaatccttcagggttaagacgctttttcacactgcgttccttgtctttggtaacaatggtgggctgataaggcaggctattgtagaaattattaacctcttgctctgtcagatcgtgtccttcgtccttactcagcgcactatggctttctatccaaaagtttatgtcttccaaagccttactatagtcagggttatcactcaacacataagcctctgcacggcatagtagggtttcatctaccgaaaacggtactgctaccgtgtgcgggtagtacaggccattggccttgtctacgtattcaaagtacaatttcagtttcgggaaaggatttttctgtactacactgaggatgaaagtactcataaccagtccacccctccaatgccagggaccgtctgcgtcaatagtctcgttagtatagattggggttccgtgtccgtagcgtttcaaagtattataaggacctgtaatgataggtacttgcgaccctaaagcagctaaaagcagattggccggtttcttttcagacacgtattggttgctgatgtcgtccaccaaacttactccgccgaaatcagcctcccaattacgcagtgctgtgaccggattgctgccgatggcaatgttggcacattctatcaccttatcccatttttggtaatagagataaaaccgtgcagcaaaagcgttggctgctttacggttgaagtgatacttgggaacctcataagcagcatctttaatgagcggaagtccagcttccaagtcagcagcaatctgttcatacgtattcttcaagctgcctcgttcagtattttccggatagacgctgtcaccggtccgagtacggtagggtattcccaaatgactttctgccgtattcggattataaggcatacagaatacattagctaatagaaaatgggaataggcgcggcacaccaaagcttcgccccgttgcggattgaggctggcaggcgaacctaagttttcgataccttccaatgccatattagccgaagcaatagcagcataacatccttcccaaagggcatagggactatcgtaactactaatgctgggagaatcccacaaataaagtttttcgatgagttcgtccgtatcaaattgtccaccgttatccatcacgttatccgatgacaactcgccaatcaacagcggaagagtagttgggtatgccgaaaccaacagtggagatattttgtcggtactgttgatttccgtgcggctatcgggcagtgtatccaaaaaatcactgcaagaagagaatgccagcaatgaaacggatagcaaggttatgaatgatttatttttcatgtgattcattatttaaaaaaattaaatgcctaagcgaatggtaaaagtgaactgtttagccatgggaacggccacaccacctgtgttaaagaattcgggatcctgcccgtttaatttgtcgtctgcataaagcaaaaacaaattagttgcctgcagtttcaatcctaaattggaaatttttaacggttcaatccacttcttgggcaggtcgtatgaaagcgaaatctctttcaaacggataaagtcaccctttgcgatgcggtcactggagtaattataagcattgtaggcacggctcagataactatcgttcacattcatatacttatctgctatcaccggaatattggtacgatgctcgtcgcccggcctcatccaacggttcttgaattctttcggcatagcatcaaggtcggtatattggttgctaaataccggatccaaacggatgacattgccaaaagaataagtgataaacacattcagtttcagacccttgtagctgaatacatttcccaaactacctgtaatggtaggatctgtagtaccttcataaatcaggtgtgatttgttgttgcgctcctggaagttgatgttgcttgtggtcaattcgccattttcattaatgaaagtaggcagaccttcttcattcagtccacggaagtcgagcgaaaacaaacttcttaccggatagccttgcatggcaaatccatatccgctcaccatgtccattaccgatgagaatgcctccaaatcggttaccttgttcttggttttagagaaaatgaagtcagtgttccacttgaagtccttcttggcaatgttacgggtagaaagagtcagctctataccgtgcgaacgcatgcttgccacattggcatacttgccaatttctccatccagaccggtagtactcaaccatcctatcaggtcatagttcttgcgtttgtaccaatccatgctgaagttgatacggttatccagaaaacctaaatcgatacccagattcagttcatgtttcttttcgtaagtcagttcagaatttttgccttgtaggatgcccagtcccgactccatgacatcggcattgggacgccaaggattataactgctcaccattgccagcgagttactcacaaaggcaggaccacggtcggcagtcagcgagtaacttgctttcagcgtcaagttagataatatggaattcagtttgctgaaccaagtttcttcgtgcgcattccaagcaccggaaatattccatgtaggcaaccagcgagccgaacggcttttacctagtttgttggaaccttcgtaacgcactgtaccgttcacggtatagcgtcccttccatgaataagtgccggtagcgaaaaaagccacttggcgtgctttggtttcgtcaacagtattataaggtgtattttcctcgttgccttgcttgaagaacaaatagtcgtaactggaaagcatacccatgccatactgcatacctgcaccgttaaaccacactttgctgcggtctgtggcatttagttccataccaccgaaaaagtttacgatatgattttcgttgaatacatcattgtaactgacggtactacgcaagtcatagctcgacatagtatatttcgtatcgcgatagaaaccgcctacgggcagtaccgattccggtagagtattgattttgtcaggatcggtatagagccacggattggcttgctgcatggtagcgtcatccatagccctataagcccatgcctgattagaataatctttcacataatggttttgggtagtagatgagtacttgtaagcccccaatatgctcaattctaccttttgaataggcttccatttcatttcaccctggaatcgcatatcagtaacttttaaatccatgtagttgttatccagctcgtggaaaatattaaacggtgcatagttacgtacgtagtattcattgggatccaatgtgcgcgaagtattcagcgcaaatgagtaaggattgatgtcgaagtcacgtttcacctcaccacttacgggatcagcttgcgaaccaagagtaccgggagcctgctgcttgcgaaaagatgcattcccgataaggttaagtgtaaggtttttgaagatattatacgtagaattaatgttagccgtataacgttgcactttgctcctcttagtccatcccgggtcgttcatcacactgatggaagtataataagaagccttgtctgtaccggtagccatactcacagcatgattttgtgagatactattgctgaacaacaggtcgaaccagtcggtattacggaactcggcctgcttcagataagccccccgtgcttcaggcgtattggctaaaccaaatacaccgcctgttgccgaatattgattaatgagatgatacattttaccatagacaccactctgcgaagcacgataagaatcaacaaaactcagggaaccgttttgctccatattcttgtatacatccatttgctcttgagagttcatgatgttgaaattgctataactgggtttcatgcgcatggtaaactcacctgtataactgattttgttcgtacctgatttaccttttttggtagttaccacaatcacccctgccatagcacgtgcaccataaatggaggtagccgaaccatcttttagaatttgaaaactctcaatatcatcggcattcaaaccggcaatagctgaactgatcagagtctcagcatcacctgaggacagatcgtcagcacctatctcagctacatcttccatgataacaccatctactacccacagcggcttggaacttccgtaaatggaagttgcaccacgcacacgaatcttaggcgccgtaccgaaagtaccggatacattttgcacagatacacctgccgaacgtccttccagaccgcgactgatatctgccataccatccattttgatgttttctgctttcaactggtcggtagcaccggtaaacatacgtttatccatacgctgcatacccgtcacaacaacttcggacagcgtctgtacatccgattggagagtcactttcatagtcggcgaaggagaaagcgactgaggaagcataccgacataagaaaactccaacttggaacgactggaaacattaggcaatgtaaacttaccgtctatgtctgtcagcacacccgtagaagtacctttcaccataacggtagctccaataagcggctcaccgtcatcggcagacagcacaacgccgtttaccgtatacactttagcctgtttggaaggaccttttgttgtaatggtaataaactccttatcgatagtatactcaagtttcttaccagaaagcacaatatccaaaatttcccggatattcttatccttgatggcaccgctatacgtatatgacttcacatcatcatacgtaaaaaggattttataacctgaaattttgctcaactgtttaaatacagaagacaactcttcattcttaaactctactgtaagtttcttctcacctacctgagcttccgcacagaacggaagacaaaatagaaaaaagaaaagcggaaataataagtacctctttcttctcatacgtttatttttaataatattagcgaagcttcatttattaataatacgtatgacttgaataacaagatacctttttaccttatttttttcaattcatgaaactttttctctaaaaagcatctacaatatggaagaaattacacaaaacatgcctccatctagtcaacatagaccgtattctcacaaagtgttaacgttactttttttaaacggttcatcaaacgaattgtttcttcaataccaccctgacgattggacataaaatgtatgcgatatgtcatggcttctttatttctaaatataacgttcacattataccaacgtccaatagacttcataatatccgccaaagtcaactcatcaaaataaaaatatccatctttccaataagtataggcctcactgtttacttccttcacctcaaactgcccattggaaagaagtatggcatctttacctggttccaaatccacaaaacgtgcattttcatggctgcgaacctgtaccttaccgctaatcagcgttacatggctgtcttcggctgtataacttttcacattaaactccgttccgagaaccttagtttgcaaataatccgtctttacaataaaaggttttgtatcttttgtaactttaaaatacgcttctccttcaagaaaaaccgtacgctccctttctataaaagctgtaggataaaccaatttactattggcattcagccacacctccgtaccatcacaaagaatcaatttgaatgtctcgcctctggggattacaatagaatgagtctgtaacatctttttcactaccggaacggaattcctcgctagattagtataatcaagagtccgccgtttttctacttgtttgttttcttttttaggctcatcatccaaaaagaattgcttgccgtcatttaattccaaaacaatacgctgttcattcggatccgcagcaaataccgtgacagatttaggcggggcaaccggtatattaaataaataattaaatgaaacaaaagctcctaccaggatagctgctaccgaactgctccatatccaaaacatcttaagatattttttcttattctgtctacctttcaaacgagctaattcagcctccacatcaaccataccggaagcctggcacttatgcaaaagatatctgacatccatcaaatccttacaggcatctaatgtctccacatctttcaaatcctcccatttcttgtcagagctatcggatgaactctccattaaatccagtgctttatcaaattcagatgtactatcttgattactcataaatccgctagtttagttaataccttattataaatgcgtttataaaacttattttgaaccgtttagcctattttttatatttatttagcaaattcctcacgaatagccttcaaggctttaacaatatgttttctaaccgcacttatgcttatattcaattctgcggctacttctttatacttcttctcatgtagatagcactcttccaggatatgcctcgtatgcggggtcattccatccaacactttctgaatcttcatcatacgctcgtcttgctccttgaactccacttctgtataattttcatacaatttctgagagaattcagcataagcataatgtatatcctgatgtctcagataatcgatagcacgattgcgtacatatataaagagatacgacttagccgtggccttctctatcctatcaaaattcttccatatatattcaaaagcatcgctcgctatgtcacggcttacttcccaattattaatgagagaatgtgcataggaataaagagagacataatactctttaaaaaagaaatcaaagtcggcaaagtcctccacccttttacaatttattattcatcttaaacaattttaccagcgaaattaattattattataatacaaaaaaagcagtattaactcttttagcgtccaaaagagttatataatattaatacatcaaaaatcaagctaacaaaagccactcaaggttatttagctttcctgcttgtccgatagaagtttctgaacctcacggtctgccttagtcaacttatcactgcaaaaagcaatgatttcatttgcctcctttatctttacggcaagttcatctatttccagttcattgttgtctatctgactgacaattttctccaaccgttccatcgcttgggaataagtctcttttttcttgggtgcaggcataggattatttatttttttgacagtttatttgttactactgaaaccacttctcctttatacaggcgagtgataatttcatcaccctcatttaagagagaagcattctttattgcttttccgtttttcaatgtaatgctgtagccacgggctaattgcttttccggagaagcatccgccagccgttgttgcagtaactccagccgatgatgctgacggaacaaggaggctgttacagcttgtacaatatcttttcggacggtaagcaaagttaattttgcatccgaaatgcaaccataagcagcagagggaatacgattcctgtatgatactaacttctgttgctcttgtaccagcaaattccggacaccatcgcataggcgggcagccagcgattccaattcatcggcagcctcattcatgcagtctatcagaaattcggcagcagcagtgggagttttgacacgggtatgggccacggaatcgagaaccgtatcatcgcgttcgtgtccgatacccgtgataacaggcaaaggaaactgcgcacaggcagccgcgagcagataagtatcaaatccggaaagatcggaagttgccccaccgccccggataataactactacatcaaaactgtccgaacgggaatttatcttatccaaagcagacaaaacggattcttcaacacgatcaccctgcatcaatgccggaaaaagttccgtatagaagtaaaaacctcccggattattctgcaactggtggcaaaaatcaccgtatccggcagcggttggggaagaaacaaccgcaatacgctgcggcaaacgaggcattctcaattctttatttaaagtaagtaccccttcttcttccaattgtttcaaaatctctttacggcgacgggccatatcacccaaagtataggtgggatctatatcctgtactgtaaggctatatccatacagttcatggaaactaacggtcacttgcaccagcactttgatacccgaaacaaaagcctgtcccgtagcttcctcaaaatagggtttcaacaaacgaaagacgttcgaccatatcgttcctctcgccttagctatcagactattactacggacatctttctgtacgaactccagatagcaatgtccggtgctgttggtacgtacatcactcaattctgcctgtatccaataggcatcaggcaaacattgctccaagctgcgacgcaccagcgcatttaattcgtatagtgataaggcatccattctttaagtataagtatgcaaagttcctgtccttacttcatttttaatttatagctattatatgctttccacatatccggcacgccataaccgtagatattatccggatagtcggcacggtcaccggaagcgcggactaattcaagcaactctttcgctgtcagccgggggcatgcctgccataaacaagccaccattccacacatgacgggcgaagagaaagaagtcccgtttgccttaccctgatttccgtccgtgcgaatcacatccgctccttcgcccacagctacaacatccggtttaatccggttatcagctgtgttgccgatagaggaaaatggcgccaacaccgcctgtttgttgatagcgcctaccgtcaacacattatcagcatctcccggcggggttattcttttccaagaccccattcccgaattaccggcactgcacaccagtaccatacccttatcggctatatgcgaggcttgacgcgacatcaaggcatgatgtccgtccaaatcacgatatttgtaatttttcgatttgtcatcgaacgcataataccccaaagaagtattaagcacatcaactcccacactgtcggcaaactctacggcagcagcccaataatcctgttccaccaagtgttcggaagcctcatcctcactgcggaacagccaaaaggaagcttccggtgcagtacctgtcataattcccggctgattcattccaatgcaggaaagcacactcagtccatgactgcttgccgcaaataaatccgcctgaggattgacaaaatctttcatgcccaagacacggatattccgcatagccgttatcttatccagattatgaaatccggcatcaatcacggcaatcgtcattccctgccccctgaatccggcatcatgcaacttatctccattgctcaactgaatttgagtgagagcaggaccgtaaatactgtctgtatatatcttcggctcattgattacagaatcgcgcattgcatcccccattccttcattcattttcggagcagtccatactttctccgtagcgcgtacaaacggcaatgcggcaatatgttctatcaaaacggaatcattgcaggaaaccgtaacaaaattttcccatttccctacaactacaatattcactccttgtctgcgtatttcatcaatatactgacggcaaaccggcaggtcggtggaatcaaccgccaggttctgtttttgacgtcttgcaatggctttctccgaaaggaactgttcaggatgctccaatgaataaacggtagctgccttgtctcttaaactaatacggtatttcaacgtatcttgctgtgccgacgcacttgccagaaacaacactaaagctgaaagaataatcaatctcttccccattaatctctttttattttcaaatttcagtttttaatttttaaatatacatgccgataccacgttgtgaagcaatgaacgaaccgcctaccaccctttttccaatatagaatacagctgattgtccgggtgcaatggcagatgcttccgtctcaaaatgcaccagcaatcgcccgtcttccagacgctttaccgaacaaggtatcggtttgctccgatagcggatgcgaaccgtcagttccccgcttccaaaaacttccccctcatcaatcagattatcctgttccgcaagcatatattccgctttgagctgctcggcatctcccaacattacggtattcttctgcggatttattttcagcacataagctggttttcccaatgcgatttcaagtcctttccgttgcccgatggtatagtaaggaaagcccttatgctctcccagcttcactccttccgaattgacaaaccatcccgggcctacttcattgtctatctccggcgaatgctcacgcaggaagtcccgataatctccttttatgaagcatacttccatgctctctccttcctcggctttcggtgcatagcctttatccctcagataatcgcgcacttgcatcttggtataggttcccaacgggaaaagacaacgtcgcaagacatcctgccccaagcgccaaaggaaataagactggtctttcttatcgtcatccccggcaactatatatattttcctattctgctcttccagacgggtatagtgcccggtagcaatataccggcaattcaatttatccgcccactccgttagaatgcggaacttgaacagaggattgcacatcacacaaggattgggggtacgcccctgccggtattcatcgataaagttccggacaatcacctcacgaaaagcctctcgttcatcagccacataatgttcaatgcccatattctgagcaagctggcgggcttccaacggctcttctccccacacccacatcgtaagaccgattacctcgtacccctgctcttgcaacatcagacatgtagcggtactgtcaatgccaccgctcattccaaccaacactcgtttttctgccttgttcatttctcggatatacatcgtttaagatgcaaaaatacaggttttcaaacagaagaaagagaaaaggcatgccttttttgcaagagttcacatagctgcatatcgttttgcccgtgactttgtaacagaaacgaaacacatatgacataaaatcacaacacatacgaccgtatctttgccaacataaacaaaccgacaacaaattatgaaaaaaagcgcattgatgctgttcctcaccctgttgccctttatggcaaaagcccaaaacacccaaaacagcgaagacggaaagaagatagacaaggaaaaactggaaagcaaggattatctgcccgaaatacacggaacaatccggggcaaatacgaataccagaccactatgggcgccggacgtttcgaagtgagaaacgcacgtgtcagcgttaccggcaatgtcttgccgattgttgcctacaaagccgaaatagacctgtcggacgagggaagcatcaaaatgctcgatgcctacgcacgcctgtttccggcaaaagggttgacagtgaccgccgggcagatgcgcgtgccttttaccatcgacgcacaccgatcaccccaccagcaatattttgccaaccgctcgttcatagccaagcaggtgggcaacgtacgcgatgtaggtatcacactgggatataccctgcctaccgacctgcctattacgatagaaggcggactgtacaacggttcgggcctgaccaatcaaaaagaatggcataaagaagtgaattattctgccaaagcccaatttcttttcaccaaagggctgaacctgacactgagcatacagagtatccaaccggaggaaatacgggtgcaatcgtacgacatcggcgcttactatgagtccgaccgcttccatatcgaagcggaatatctgtacaagcaatattccgacaatgccttcaaagatgtacaagccgtaaacacattcatcaattacgaccttccgctgcgtaaagtattcaataaaatgtctttcctgctacgctacgacatgatgacggaccaaagcgacgccaagaccaccgatgaagaaaccggcgcattggtcaccaccgactacaaacgccagcgactgacgggcggtatcaccttcagcctcagtaaagcattccgcacagacctgcgcctgaattatgaaaaatatttctatgccaacagcagtattgcaaaagaatctgaacaagacaaaatagtattggaattaatggtacgattctaaaaaaattacatatctttggaataagcaaattgatgtatgacaaatccgcttattccgggcatcactgccgcagaacaagacgtgttgtatcaaaagctaaatgaatacaacctgaaaaaagcttctttcaaagaggtaggcgcctatcttgtggtattgccaagagcagattgtccccgatattcactttggatttactcccctctgcccgaaaggcaatccatattttacatattcgacctgagtgaggatatacacgaagccttacgaatggcaagcaccttatgttactactccccccgtcctctgtcgttagtggagtataatgccaaacgaatgcagaataagggcgacgatattatctcgttcggcaaatatcacggacattatctgcacgaaatcctgcggatagaccccggctatctcacctggatagctttcaagttcactccccgaattcctaaacaggaacgcttcgcacaaatcgcccggatataccattccgtatacattgacatcctgcaacggaaagccaagcaaccgcctgccggacgctttcttgggaaagaaggggaaaaagtgacagatctgaccctgaccgttctcagtgtccggctggaggacgacccctacaagacacaagtcaggggtacgaccccttacttctatgtccggcaaatactaaggctgaaagacacctccggaaatcttgtgactttccgcgtcaactcccgcacggcaagcaggcattcgtgccaactacccgccgtggaacatgcttaccggacagacgaaaccgtccatatagcctcggcacgcattgccggtacgtacaccatcggaaaaaacaaatggacgcgacttaattatgtaaaatttcatccataagaccgaatccggtcaaaaattccatttcaaacatcaattcatccaccccttaccgaagagaaacccgtatttttgctccatacatatttaaatacgtaatgccatgaaaaaacaaactgcactctggtgcttatccctcctattggtgatgggagcctgcaccacatcctcctcccggaaaacggccggagaatgggcaaaagtacccggaatactaaaaaatatcgtaccgcccgtattcgccgatactgtttatgatgtaaccgactacggagcaaagagcgatacaactttcgacagccgtcccgccatcctccaagccatcagtcattgtaacacgaacggtggcggtaccgtactcattcccgcaggaaattatttcatcaaaggagccattacactgaaaagtaacataaacctgcacatcgccgaaggagcacgtctggaattctctaccgaagccgccgactacctgcctatggtactgacaaaatgggaaggaacagaatgtttcaactactccccctttatctacgcataccaatgtacaaatgtcgcggtaaccggcaaaggaactatcgacggaaacggttcggtgactttcaacggctggcatgccatacaaggtcctgccgtagaccgtctgcgccaaatgggtatcgattccgttcctgtataccaacgcgtattcggagaaggacactatctgcgtccctgtatgatacaattttacggttgcaagaacgtattggtagaagatttaaaaatttacgattctcccttctggatcattcatcccgtattttgcgacaacgtaaccgtacggaatgtatatatcgacagcaacaattacaataatgacggctgcgacccggaatcctgcaccaatgtactgatagaagatatggatttcaacgttggtgacgacggcatcgctatcaaatcagggcgcgaccaggacggctggcgcatcggtcaggctacggaaaacgttatcatccgcaactgtcatttcgcacgttgggccatcactgtcggaagcgaaatgtcgggcggagtgcggaatatctatatcgaggactgcaagatagacagttgccgtaacggtatatatttcaagtccaacccggacagaggcggctatttcgaaaacctgaatatgcggcgcatcgaagccgatgtctgcctgtggggtgttatcaatttccgcacgaactaccacgggtatcggggcggcaatcatcctacactattccgcaacatctgcattgaagatgtaacctgtaaccgcgtggacagcgtagcgctcatggctaacggactgcctgaagccaaactgcacaacatcaccctgcggaacatcaacgtgaagaaagctcccaaagcgatacaaatggagaatgtggtgaacctgacgctggacaatgtagtagtaaacggagaaaaagtaactgccccctgattacttctctccaaccggcggacgcttacgccaatcgtctttccggtagctgtccggataaatcgttttgtccacaatctccccgcctttggtacgaatccaggtagtgaatgtgcgggcgttttctttcatcagaataacacgggcaccattcggcaggtggttatactccgtatttccacctgtaaaacgcccgtaagccaacaggatgccgtgccacataacggaataatcattatcgtggtcgtgccccacaaaagtacccattacatcaccggcttctttcatggcggcaaacatgccggtattcaagagcggagcacaagccttttccatacgcgtgcctatcaatatggcactctcatcagccgcagcctgattatattcgggtaggggaatatggaaaaaagccagagcaggcaaaggctttccgccatttctttccgtataagcagcgctctggctacgataccagtttacctgatcaaaggtaaaccaggcatatcctttcacatccggcagccgggagtaggagtgcgaatccatacaatacaacaaagctgcatcacgattactgtcggaagcctgcaatgcaagcacgtagtcgggtgaatcggcctcacctctgtccggctgaatattataaggaacagagcgaacgacatcatataattcggcacgcgtcttatcctgttcattgtcatggttgccaaaagtcacaacaaaaggaattttacgggaagaagcacaagcaagtaccgtacgcatggctgtttctgccggcttcgcatacaccacgtcaccggtaaatacaaccaggtcgggacgttctgcatcaagcacttcattgatacgcttcaaggcaatatccgaggcaggattaccatatttgaaatgcacgtcggtaaactgcactattttgaattccccgtttttatcgaatttcaagggctttatctgcgcccggcagaacattacggacagcagtaccatacaaagggtcaaagcaaattgtttcatagtattttctgattttgattcggagttcgtttattctttaactatcaagacagttgcataagccgatattccctcttcccgtcctgtaaagcccaacttctccgtagtggtagccttcacggatacatcgtcttcatcaatccccaacacagcagaaagagtctgctgcatggcgggtatatgagttttcaacttgggtcgttccgcacagattgtcgcatcaatattaccaacggaataccctttactacctatcaggtccaccgttttcttcaacaatatcttactatctatatttttaaattcgcctgccgtatcgggaaagtgatagcctatgtcgcgcatattcgccgcacccagcaatgcatcgcaaatagcatgtatcagcacatctgcatccgaatgtcccaagagacctttctcatgctccaggcgtacaccacccaaccaaagttctctatctgtcaccagccggtgaacatcaaagccaaaaccaacacgtatcttcatatcttttcaattatataataaacgtgctaaagtaggcattattcactatcggctcaaagatattctgctatttttccttaatgagagggattacgtacctaaatacaaacagcaagtcttacagcctaatacaaagagtatgaaagagctgacgaaatcagcggatatgaaaatcgagcagcttttccccgcctaaataaccttgcaaatgctgaccgacactgacgggtcctactccggcaggggtacctgtaaacagtaaatcaccaatcttcaaagtcataaaacgactgacataggctattatatcgtctatcttgaaaagcatgtctgccgtattgccacgttgtacttcacggccatctatatcgagatggaaatccaaattctgcaagtctccaccggcttgttccaaagaaatgaacgtaccgatagctgctgagttgtcaaaccctttgcacagctcccacgggttaccggcttcacggaatttccgctgcaagtcacgggctgtaaaatcaatgcctaccgtcaccgcatcataataacgatgcgcaaaacggggagctatattcttacctaaccgacaaatacgtaccacaacttccgtttcgtaatgaacttcatgggagaagtcgggaacaaaaaacggcttgccgtctttcaaaatagccgagtcgggtttcatgaagataacaggttcactattctcctgagtatgcccaagctccttattgtgctgtgcataattcatccctactgctatgatcttcatcaccttatctcattaaaattcaaacggttaaacattactgccagatgtgcatacaacgaagtgttctgaaccactatatcttccggcacacggatacggaacggagtaaaattccatacggctttaatgccgcctgccaccatcgtatccgtaattttctgcgcaatctcaataggtactgtcagcacaccgatattgacgtcatatgcctgcattttctcttcaaaatcatcggaatgatagattggaatgccattcaatgctgtccctaccaaatcgggatttacatcaaatgctgccacaatctccagaccgaaatggttcaaaccggaatctcgcagcaatgcaccacccaaacttcccacaccgaaaagaaatgctttatgtatattggtaaatcccaaaaaatcttccagcacggcaatcagcgtatctatctcataccccacacgggtacggccggaaatattgacatatgacaagtccttcgctatctgagaggcatcaatattgatttctttggaaatttgagtagaagaaacgaaacgctcccctctttttctaagcaattttacattggaaagataccacggaagccggcgcaaggtaggttccggcacctttgtagagtctttcttttgtaactgactgttcatagcttttcctttaagttctcaatattatgactgacaaaagtagtgctttttttccaatctataatatatctatgacaaaaggttaacattatttctacctgtgattgcaaagttccttgtaaaaccgtatttttggactccttttgtgagaaaattaaaacaagtatatatggctaagaaaccaaaagagaacgattggaaagacaggctgaatgtagtgtattcaaccaaccccgacttcaaatacgaattggacgatgaagaagagcaaaccactctccaaccgtcccaacaacgtctgcgcgtacaattggaccgcaagaaccggggcggtaaagttgtaactctcgttaccggatttatcggtacggaagacgatttgaaagaactgggcaaattccttaaaagtaaatgcggtgtgggaggaagctccaaagacggagaaatcattgtacaaggagactttaagcaaaaagtactggaattactaaagaaagaggggtatacacagaccaaaacggtgggataactcactgctgctttaaaaacataataaagaaaaacggtcgctatggatatttccatgcgaccgtttccatatatttacatccgtacggaattattcagcacgcaaagtgaaacgcttgaaatcaacgattttcaattcagggtcagcttctttcagcacttctcttacagtcttcttgccatccatgatatcttcctggttcagcaggcaaacttctttcaggaatttacccagacgacctttagcaatattctgaatcatctgttccggcaggtgtgcagctttttcagcagaaactgtagcaatgatttcttttgcctttgctacgtcttcagctgtaatccatcccttagccatgttgctttccatgtggtcttcgctgtcaacgtgagcagggttgatgccggctttcttcaaagcagcctcaacagccttctgtacttgttcggcttttgtcttctcgatagcaacttcgatttctttctgcttaacttcttcagaaacaccgtcttcgtcgatagccagcggattcatggcagcaatctgcatggccacttgcttagccaactgttcgtcaacattcttgttgaaagcaacaatcgtgcaaagaccgtttctgttcatgtggttgtacacaaccgtagttgcaccctctacagtcagataaccgtcgagttccatcttctcgcctgtgataccgctacggtcggttactgcatcctgtacagtaccgttacccatcggcagggcttttacttcatccaacgtcttgcacttattggcaacggcaaggtcaaggatatcctgagtcagtttcacgaagtcggcattctgagctacgaagtcggtttcgcacttcaaagcgatgataacggcaaagtcaccggtagtcttagccaaaacgcagccttcagaagcttcacggtctgaacgcttagcagcaacagcctgtccttttttacggataatttccattgccttatcgaaatcgccttctgcatcgttcaatgcattcttgcaatccatcataccagcaccggtcattttacggagcttggttatatcagccatacttacagccatactatctttcctttatattttagttaataaatatcgttctaaaaagcgaaaaagagctgagaatagagaattgagaattgctgtaaagtaactctcaactttcaattctcaactctccactatgaattaagcctcttcgtcttccttaatgaaagcggcagctttagctgcgttgattgcttcctcgtcagacttgtcgagtcttgcttttgtagctttcttcttgcctttgttggcaggagcctcaccggcagcttccatgtctaccttctcagccttacgttcttccaaaccttcctgcatagcagcgcagcaagcatccaagataacttctaccgacttggtagcgtcatcgtttgccggaataacgaagtcgatattcgtaggatcggagttggtatcaacgataccgaatacgggaatacccaaacggttggcttcgcgaactgcaatattctccttcattacgtcgataacgaacaaagcagacggcagacgagtcaagtcagcgatagaacccaacgtcttgtccaacttggcacgttgacgggagatttgcaggatttctctcttagagaggttagaataagtaccatcgttagtcagcttatcgatagtagccatcttcttcacagccttacggattgtcgggaagttggtcaacataccacccggccagcgctcgattacataaggcatatttacagatgcagccttgtcggcaaccacctgcttagcttgttttttagtagcaacaaacaggactttctttcctgatttagcgatttgcttcaaagcttcagcagcttcgtcaattttagcaaccgtcttgttgaggtcaatgatatgaataccattgcgctccatgaagatataaggagccattgcagggttccactttcttttcaagtgaccgaagtgacaaccggcttccaataatgtatcaaaattagttcttgacattgtgttttaatctttaaatcgtttactttcttttttgttttttctaaaccaaccgccgggtagcctatccgaatgaagagtcccggtagtttagatactaaacgctttttcagttgagagttgagaggtgaaagtcgagaattaagcaacttgtccgccccaaccgttctccaactcttaacgtttactgaactggaatctacgacgagctttcggctgtcccggtttcttacgttcaacagaacggggatcgcgagtcatgaagccttcagcacggagagcagctttatcttcagcattgattttcaccaaagcgcgagcaattgcaagacgcaatgcctgagactgtccggtgaaaccgccaccgcagaggtttactttgatgtcgtacttttcagcaacacccagcttgttcaacggttgtttaactacatactgaagaatgcttgatggaaagtactctgcgaggtctctcttgttaatagtaatctttccagtaccttcgcttacgaaaatacgtgcaattgcacttttacgtctgcctaatgcatttactacttccattatctcttatttaagtgcgttaatatcaatcattttcgggttctgagcatcatgtttgtgctcgctgccggcatatacatacatattacccagcaatttggcgcccaacttatttttaggcagcataccctttactacttttctcagcaacttgtcatcaccgttcggttttgcctgcaaacgagcaggagtgatttctctctgaccgccgggatagcctgtgtatgacagatataccttgtcattccacttgttaccggttaattttactttgtcggcattgataatgattacattatcgccgcaatctacgtgaggagtaaagttaggtttatactttcctctcaacagtttcgcaacttttgcgcccagacgacccaatacctggtctgtagcgtcaacaatgacccattctttagtcactgtagctttgtttgcagaaatggtcttgtaacttaaagtatccactcttaattgtttttttaaatgttactactaaatttttgcttcaccacgaatcaaccgcctcggacaaagggagattaatccgctatgaattaaatgcttatccttatgagataataatcggcttgcaaaggtacggattttcttataactggcaaacgttttcttcttttttttgatttgcacttggctgatatacaacaaaaagaaattctcttccgaggaaatacagatttcctcggaagagaatttcaaaagttcccgcccgcacacgcaaacacttataaacagaaaattttccggatttgcgcaagggacataaaacaacattcgttttatactaccgaacaatgtctaccggaaacgcggatggcatatttacccgtttccatgtttcatggaaccatgtattcagttcatttccgtttaaatcttttgcgataaagtatttcaggtacatcacacctccctcacccatttcaaattcaaggatattgtccttattatccaacataggcagatggatgttcctctcgatactttccttataggctgtacccgatatttgccgataggtaccataccccgtaataatggcatctgcaccgggccgtatcgtgaagttaacaatgcgaccgtcatcgctcagtaccttaaatgtattactcggcttcaatgttccgggaatttccggattttcagacacataatgacacaactgccaaataccttccagatgcgccggctcaaaagtagccttatcctgcgcccggactcctgttaccgcaagcagcaccactgccagcatggtaaagaaataattctttttcatattcgtatgatattggttaacgctatgccattcctattgacacaaatataaagatttatttcgagaaaataacagtttatccgataaaaaagcccgcataaaccaaagtttatgcgggtttatccgtcaaggatattttatttcgttcttcggcggttagaactccgcattgcgcggagtacgcgggaacggtatcacgtcacgaatgttagtcataccggttacaaacagcaacagacgttcaaagcccaatccgaagcctgagtgcgggcacgtaccgaacttgcgggtatcaagataccaccacatatctttcatcggaatatgaagttcttcgatgcggttcatcagtttagcataatcggactcacgctcggagccgccgattatctcgccaatcttcgggaagagcacatccatagcacgtaccgttttaccatcgtcgttctgcttcatatagaacgccttgatttctttcggataatccgtcaggataaccggacgcttgaagtggtcttccaccaaataacgttcgtgctcggaagccaggtcgaccccccagtatacggggaattcaaacttatgtccctgtgctacggcttcttccagaatcttgataccttccgtataaggcagacgaacgaagttttctttcagtacaccttgcaagcgctctatcaaccccttgtcaaacatatcattcaagaacttcacatcatcggcgcagttatccaaagcccactgtacgcaaaacttgataaattcttccgccaagtccatgttatcggtaatgtcattgaacgcaacttccggctccaccatccagaactcagccaaatgacggggggtattggagttttccgcacggaacgtaggcccgaacgtatagatagcgcccaacgccgtagcggcaagttcaccttccaactgaccggaaaccgtcagactcgcctgctttccgaaaaaatcgtcatcgtagataatagaaccgttttcgtctttcttcaaatcataaaggttcatcgtagtaacctgaaacatctgtccggctccttcgcagtcggaagccgtaatgataggcgtatgaaaatagaagaaccctttcttatggaagaattcatgaatagcaatagccatattgtgacggatacggaacacagcaccgaatgtattcgtacgaggacgcagatgggctatctcgcgaaggaactccatagagtgcccttttttctgcaaaggatacgtattatcacaagtacccaacacttcaatttcacgtgcctggatttcagctgtctgaccggagcctaccgattccgtcagcacaccgttcacgctcaaacaagctcctgtggtaatttctttcagcatctgctcatcgaagtttgccaaatccaccacaatctgcacattatttattgtagaaccgtcgttcagcgcgataaaattaacttgcttactacctctgcgggtacgaacccaacctttcacgttgaccatagcgccaaaatcctcgcgcttcagcaggtcaacaatctttgttctactaatcttttccataaaacagttattataacttgattatatatattattcgaaagagcccatgcgcaggaagttcacctcttgttccgtgaggtaacgccactcgccgcgacgcaagcctttcttggttaaaccggcaaagaatacacgatccagcttcacgaccttgtatcccagcgattcgaaaatacgacgcacgatacggttcttaccggagtggatttctatgcccacttcatcttttttgaaatcatccgtatagctgatagcatctgcctggatttcaccatcgtccaactgaataccggctgcaatctgctccatatcggctttagtcagattcttatccaaatgcacatgatatattttctttttcagatacttgggatgggtcagcttggaagccaggtcgccatcgttcgtcagcaacaatactcccgtagtattacggtccagacgacctaccggatagatacgttcgtcacaagcacctttcaccaagtccattacagtacgacgcgcctgcgggtcatcggaagttgtcaccgtatctttcggcttgttcaacaggacatatatcttacgttcgatgctgaccgtctggtcgtgaaacttcacttcatcgccacgcttaatcttagtacccaattccgtaaccacttctccgtttacagacactacgcctgccgtaataaactcatccgcttcacgacgcgagcatacaccggcattagccagaaacttattcaaacgaatcggttcgttcggatcgacaaactgttctttatactctatctgtttcttcttactgtacttggcattgggatcgtaatctcccgtacggcgaatcgggcgactgtagctgtctctgttgccataagggcgttgaggacggtcaccgttcgagttatagcgcggacggaaagggcggtcaccaccagcattgttaccataaggacgctgaggacggtcgccaccttcactgttataacggggacggtaaggacgatcaccgccagcattattaccgtaaggacgctgaggacggtcgccaccttcactgttataacgaggacggtaaggacgatcaccgccggtattgttgccgtaagagcgctgagaacggtcgccaccttcactgttataacggggacggtaaggacggtcaccgccggcattgttaccgtaagagcgttgaggacggtcgccactttcaccattatagcgaggacggtaagaacggtcgttgttataggaacgctgaggacggtcgccattttccgcattcggattaaagcgctgacggtaaggacggtcactgctgtacgaacgttgcggacggtcgccattttcactattaaatctcggacgataagggcggtcaccattttcacggttataagacgggcgactatagcttccctctctgttaaattggttaccatcacggccggcgcctgaattctcctctgaagaagaagcatcacgccaagtttcattttctgtactcattgttttattcgaataaaattaaacctactggcctcacggccattctttctttatctctaattacctttattttagcttataacaaattccggattaaaaaagttgaaatctccggtttcccttgtcgcttcttaaagccccgtatatgtatggggagtaattgcacgtaattctttctttatatcttcgcttacattcaattcttctatgaattccttgatagaattctctgtgatagcctgattggtacgtgtcaatgctttcagcgcttcgtaaggatgcggatatgcctcacggcgcaggattgtttgaatggcctcggccacaacactccagcagttatccaaatcgcgatagatagccgtttcattcaacagcagcttgcgcaatcctttcaatgaactctgaatggctattatgatatgtccgaacggaacgcccacattacgcaatacggtagaatccgtcaggtcgcgctgcaaacgtgacaccggcaacttcacagccagatgttcaaggatagcgtttgctatgcccagattaccttcggcattttcaaaatcaatcggattcaccttatgcggcattgcactcgaaccaacctcaccagccttgatcttctgcttgaaatattccatggagatatactgccagaagtcacggttcatatcaatcatcaccgtattaattcgcttcatcgcatcgaagatagcagatagattatcataattggaaatctgagtcgtatattcttcgcgctccaaccccagtttctctgcaacgaacttagtaccgaaagctttccagtcatattccggataagccacatgatgtgcattgtaatttcccgtagcaccgccaaacttagcagtaaccggacaagccttcaatgcaaccagttggcgttccaaacgatatacaaacaccattatctcttttcccagacgagtaggagaagccggctgtccgtgcgttttggcgagcatcggaatattcgcccactcttcagcataagcacggagttgcgctatcaattcctctatctgcggataatatacctgttccaatgcctcttttacagacaaaggaatagaagtattgttaatatcttgtgaagtcagcccgaagtggataaactctttatagtcgtccattccgcctaacttatcaaattcttctttcaaaaaatattcaacagccttcacatcatggttagtcacgctttcaatatccttgatacgtccggcatcggcttctgaaaaattacggtaaatatttctcaaagtttcgaatacatccttattcacccctttcaactgaggcaaaggcagttcacataaggttataaaatattccacttcaacctgtacacggtattttatcagtgcgaattctgagaaataggcagccaaagcatctgtcttgcccctgtagcgaccgtcaatcggggagattgcggtaagtaaatcaagttccatacgtcgtatttatgataattatcggattgcaaaattacggcttttttccgagtaatcaggtataatggggaaataaattaaaaaaatgaagtttcagaataaaaaaatagctttgcatactatatacaaagctaaaatccgcaacaatgtgtgggcgttgacggattcgaaccgccgaccctctgcttgtaaggcagatgctctgaaccagctgagctaaacgcccttttgataaacgaaagtgcttgttttttttgcgtgggcgttgacggattcgaaccgccgaccctctgcttgtaaggcagatgctctgaaccagctgagctaaacgcccgtacacttccgtttcaaaagcgatgcaaaggtacagcttattttgaaattaccaaaactttcgccatttatttttcaagttttttttcacacaatattaactactattgaatttcaagcaattagccgcatcacttttttatatcatttttgcggattacctttgccggattcccaacagccacacaatcggacggaatatctttggtcactacacttcccgcacctataatgcaacggtcgccaatagttaccccgggacaaataacagcgccaccgccaatccagcaatcttcacctatcgtcaccggataggcatactcctgctctacacgcctctccagataatcaaacgggtgttgaggggtataaatctgcacacaaggccctatcagcgtatatgccccaacagtgatatagccaccgtccagaaaagtacaattggagttgataaagacatgttccccaaggcggataccatcaccatgatcgcaacaaaaaggcgggcaaatagtggcagaagctggaataccgggtatcaattcttccaatacgctccggcattcttcctcataaccgctcatagcgttcagcttcagcaacagttttttcgcacgtttaaaacgctcttgaatttccggggaagccgtattcgccaattgtgaactccgcattttatctacctcatccatattcttatccatttttattgtacaatatactacaagccattacatatatgcagcaatgccgtcagtttctccatccagtcttcatcgggagccacatgcaatccgcgtatgccaagcgcttccgccgccttgatattctttaaactatcatctacaaatatcgtttcttcagctttcataccgtcagcagccaatgctttcaggaaaatatccggttcaggcttgtaagcctgcatttcatagctgcaaaacagcgtatcaaaataatcgcttatcggtttatgttcgtcactgaacttatcactgcgggtaaaagccataataaacggattagtattgctaagcaggcaaatgtgatattcctcttttaacttcaataaattgtgaagccggttcagaggcacatcacgtataaagcccagccagcaatattgcgcctcatcccaaccgacagattcgcgcccggcagcctcagccattctccggcaaaactcaccggcatcaatctttcccgtctctacatccaggaaaaatcccttttggccgtattctcccatatactcatccgtattcactcctgcttcacgaaaacggcggaaagcctcttccgaattctggcggaatatcacaccgcccatatcaaataatatattctttatcatataccaatgcttatttaaggaaaacggacacccgttgccggatgtccgctttattacaataatatatcaaccggcttatttatattcctgccagctcttgatttggatatcttccatcttcatctcacagaaagcttcaatgaaagcacctgccagacgggcattcgtaatcaacggaatattatgatcgatagcaccgcggcgaatcttgtaaccattggtcagctcgcgtttagagtggttcttcggaatatttacaatcaagtcgaacttatgttcggcaatcattgtcattacattattctccgcatcggcacgttcatccggccagaacacagcttcggtgcttacaccgtgcgcattgaggaatgcagcggtacctgccgtagcgtaaatcttatatcccttcgcaaaaagcatgcggctggcatccagcaagtccactttcgatttcattgcaccggaagagaacatcacacctttttctggacgcggaatcttgaaaccggtagcaatcatggaattcagcaatgcttcggagaagtcgtcgccgatacagcctacctcccccgtagaagacatatccacgcccaataccgggtctgcgttatgcaggcgggagaatgagaactgggaagccttcacgccaatccagtcgatgtcaaacgccgacttgtccggacgagagtaaggagcatccagcataatcttcgtggccgtctcgataaagttacgtttcagcactttggatacaaacgggaaactacgtgaagcacgcaggttacattcgataactttcacctcattgttacgtgccaggaactggatgttgaagggaccggagatattgagttcctttgcaatctgacgactgattttcttgatacgtcgtgccgtagcgaagtaaattttctgtgccgggaataccagcgtagcgtcaccggagtgcacaccggcaaactcaacatgctcggaaatggcatattccaccacctcgccgttctgtgccacggcatcgaactcaatctctttcgtattctgcaggaactgggaaaccactaccggatattccttggaaacctcggcagccattttcaggaagttctccaattcttcttcatcgtagcatacattcattgcagcaccggaaagcacatacgacggacgcaccaataccggatagcctactttctcaacgaagcccttcacatcttccagactggtaagttcctgccaagccggctggtcgatgccgagctggtcaagcatggcagagaatttattacggttctctgcgcggtcgatagaaacaggcgaagtacccaatacaggaacagactgacgatagagtttcattgccagattgttaggaatctgaccgcctacggatacgattacgccgcgcggctgttcgaggtctataacatcgagcacacgttcaaaagaaagttcgtcgaagtacagacggtcgcacatatcgtagtcggtagatactgtttcggggttatagttaatcatgatggatttgtaccccaacttgcgtgcagtctggatagcgttcaccgaacaccagtcgaactcaacggaagaaccgatgcggtaagctcccgaacccaatacaactaccgatttttcattcttataatagttcacatcatacccttgtacggcatacgtcatataaaggtagttcgtcagttccggatgctcggaagcgacggtattgatacgttttacagccggaagaatacccagttccttacgacgggcgcgtaccataaggttttccttttccatattaccttccggattcagcacgaaacgtgcaatctggaagtcggagaaaccgagcactttcgcttcacgcagcacatcggcaggaatatcctccaccttattatattgtgagagtttattcttatagtctacaatgttcttcagtttgccgaggaaccaagggtcaatcttcgtcagctcaaagatacggtcgattgtatagcctttttccagagcctgggcgatagcgaacacacgcagatcggtggggtgagccaattcgtgatccaaatcttcgaattccacactatcattacccacaaagccgtgcatgccctgacctatcatacgcaaacctttctgaataatttcctcgaaagaacggccgatagacatgatttcacctacagacttcatgcttgaaccgatttcgcgagacacacctgcaaacttcgtcaaatcccaacggggaatcttacaaatcaggtagtccaattgcggagcttcgtaagcagaattaggagttcccatttcaccgatttggtcgagcgtataacccaatgcaatcttggcggcaacaaaagcaagcggataaccggtagctttggatgccaatgcagaagaacgagacaagcgggcgttcacctcgattacgcgatagtcgttggtttcggcgttgaacgcatactgaatgttacattcacccacgatgccgaggtgacggatacacttggtagaaagttcctgcaacatcttcacctgttcgtcggtaagcgagcaggtaggagcaaccacgatagactcaccggtatggatgcccagagggtcgaagttttccatacttgctacggtgaagcagtggtcgttggcgtcgcggattacctcgaattcgatttctttccaacctttcagggattcttccaccaggatctgcttggagaacgtgaaagaactttcagccagtttgacaaacgcttcctcgtccggacagataccgctgcccaaaccacccaaagcataagccgagcgtaccattaccggatatccgatttcgcgggcagctttcaaggcatcttccatgctttccacagcgtggctcttcggagttttcataggaatctcatccagcttcttcacaaagaggtcgcggtcttccgtgtacatgatagcctctaccgaagtacccaacacacgcacgccgtatttctgcaaagtaccgttcaggtaaagttccgtaccgcagttcagcgcagtctgtccgccgaaagccagcagaatgccgtccggctgttcttttttgatgatttcttctacgaaataaggagttaccggcaagaaataaactttatcggcaataccttctgatgtctgaattgtagcaatattcgggtttaccaataccgaacccacaccttcttcgcgcaaagccttcaaagcttgcgaaccggaataatcaaactctccggcctgaccgatcttgagcgcacccgagcccaagacaagcactttcttcaaattcttttccatattctcttattgtctatttaagttcattcttcacattccggcacaaaaaaaatgcgttaccccgaataaggattaacgcattaccaaagaactaaaaatatcgttttcggaaaaagagaaaccgacagccagcgaatgaaattcattcgaacgtaggttatatgtacttctcttttcctgcgattgcatagttatctctaaaatttctgcaaagtaacgacttatttacgatttgagcaaattaatcagaaaaataaatttattacctgaaaatagcagttacttttgcaaccggtcacaccggtgagtatcgcaaccggtacactggaaatataaagagtgttatacaatgaaattaatggaaagatttacttacggttacgggaaaccatttggcagatgtaatcacataggtcattttactatgaactatcggcttttccggatcgagcgaaccggcaccgccacctcccgctacattaccgcccaaataaatctctactgtgtaatgtttccctgcctcgatagtgtatccggcatctgcttttgtaaattgaatcggataataaacaggagtcggaacattactgcctatcgttcttatttccgactgaatggaaaggatggtcggtttactcgtaccgttattggcaaatgtataaaaatgattgaaaaccgtacggccttgattcagtgtgaaaggagtgagtaccgcatctttcaaaacagtagattctgtggcggaaccggcagaaaaagaactataagaaacatcacctgaatagaactcggtctgaaccgctttttccgtatcggtaccaaagaatttcccacttttaccggcaaacagcaatgcaacacttttatctgtaatctcaatatcgccaccggtacggttctcacgttcgtcttgaacaaccagttctatctttgccgcaacaaagtttagcgaaacaatagtgccaccatatatataaccgtccggagaagtagaaaaagagacatcattcactccggacatccaaagattatcttccgtctgagttgtcacattgctattttccattaaatcaccggtaactgccagaagttctgcttctgtttttacattggcaaagggactgtcggcaagaggaccgacattggctattatatacacttttttggcagcagttgttccaaaaccaagtcttggctcctcgacgtcgccgggctgattaggatcaaaacgcacataaaaaggggtactatccaaagcaccaccctcacggaaagtaaatgcgacataatcgttaattacagcatcggtagtggcagcagcgcccgcagctctggattgtgccaaattgttgcccgcacctactactttaatcgaaataacggctttttgtcccggagcattgttatccaaatcgatgatttcttctttggagcatgagaatatggctaaagtcgcaaaagccaccactaaataaattgcattcttttgtttcataattttcttaattacatcattagtgtcccgttaaaatgggacgagttaaacaattaatcaaaaagccccggaatcaggggatcatttagatctttgacatcattgaaattagtcttgtcgaacaggtcacgcaagtgggttttgtcagtcaatgatatgctgagaatttgtaaaacttcataggttgaacgtttcaacttcatatcatgttggacaatagccacaagacagtacgtgataatagccacactgatttgtatgcgaacagcgttctctgttgtgccccagaatttctttatcttgagatgctgcttgagccatttgaagaacagctcgattaaccatcttttcttataaagatcggcgacatccagtgcagaaagttgttttgcattcgtcaaaaaagtgaactcacggtcatcctcttcgtcgtaatatcggacgagtctgaatgactcaggatattttttctcggagagatatccggtcagtttcacttccgcatctgtcattatgttctttggcattcttcgcttccatctgactgtcttatactttaagttcgtcttggctctgacaacaaagaaagagtctgtaagatgtatcctatagagttctttaaaggagtcataagccctgtcgaatatataataagcatttggttcataatggattgaagacattgctgtggaatcatgctttgatgcagtagttacagtatagaaggcaggaacttgtgcttcaatgtcgtataagacatgagctttcacccctcctttcttgcttcggaactttgcccatgggaatgttgcaagacacaacggaatcgttgttgaatcaaacgcatatttctttccggaaatgtcaaggatgttggtcgtccgcttctcgcaggcttccttcatcatatagaatgcaaagtcttcgaagattctgtaatcacggttctggttcgctgtcgcaagagttgtcttggctatcggttcacgacctaaaccaagatgatattgcttggccctatgcgcctcgaaagcaacgactaagtctcgcaggctctcacggttactcagttgtccaaacatcatcgcgagcatctgattccagcaagtgaaatgtttcacatatctgttgccatcatacttgcgaacatagttgttgaactgagtcctgttcagaaaagcggttaattgagagaatacgtatttgtcttggaacatagcagccatttgtattagactgcaaagttgcaaaatcaagtccgtttcatttcaaaaaaccgtgtaattgactatatttcaataatttcaaagaactatttatccacttttacgggacagtagtgtaattacatatttaataaattaattttccattgctgatcttctgatttttcacctgtctacgtaacacagatgaaaattggaaatcaactcaaaacaaaccggacttttctattcattttcgctatatatactttacccatgtttttttgatgctacaaaattaatatctatatttgagtatctagttatccaaattaatcaatctgttatccaaactaaccaatctgttatccaaattaaccacatgccaaaatttagtgctgttttttacattttctcctctatctcatagaatacagagaataaaatgacgaagaatctcttcgcttgttaaggaaaagaggataaagtccgaatccactttgacagagaagaaaatatcggtatctttgcagataacttataaactttcagtgaaataaacaaaagatacagatatggcaaaagaaaaaatcatccttacgggcgaccgccccacgggacgcctgcatatcggacattatgtaggctcattaagacgcagagtggagttgcagaactccggactgtatgacaagacgttcgtgttcatagccgatgcacaagcattgacagataacatggaaaacccggaaaaggtacgtcagaacgttatcgaagtagctctcgactatctggcttgcggattggatcctacgaagagtaccatctttatccagtcacagattccggaattgtgcgaactgacattctattatatggaccttgtcaccgtatcgcgcctgcaacgtaacccgacggtaaagacggaaatccagatgcgcaactttgaaacaagtattccggtggggttcttcacctaccctatcagccaggctgcggacattacggcgttccgcgccaccaccgttcccgttggcgaagatcaggaaccgatgattgaacaagcccgtgaaatcgtacgccgcttcaactttatctacggcgacacattggtagaaccggaaatccttctgcctgacaatgcagcctgtctgcgtctgccgggtacagacggaaaagccaagatgagtaagtctttgggcaactgtatctacctttccgatacagccgacgagattcagaagaaagtgaagagcatgtacaccgaccccgatcatctgcgcgtacaagacccgggcaagattgaggggaataccgtatttacttatttggacgctttctgccgccccgaacacttcgaacgttacctgcccgactatccttctctggaagaactgaaagcccactatcaacgtggtggtttaggcgatatgaaagtgaaaggcttcctcaacaatatcatgcaggaaacgttggagccgattcgtaaccgccgcaaggaattcgaaaaagatattccggctatctacgatatgctgaagaaaggctgtgaagcggcacgcgaaacagccgcagcgacattggacgacgtacgtcgtgccatgaagattaactatttcgatgatgcggaacttatcgcagagcaggtaaagaaattcagcgcggaataatctccgcgcggcaaggcataaaagaaagggctgtatccggtagcggatacagcccttgttcttttctatttatctgttagttagcagatttcactaataccacacggttcagaatcggttgtccgaacttgtcgacaccaccatcggcagaaattttcaagcggttggcagggataccgtaatcctttaccaaaacatccactacagcctgtgcacgtttcaagctcagctctttgttaaattcaggagtacctgttgcagagtcggcatagccgtttacggtataggtagtgttcgggaactcttgcatctgtttggccagataagaaatgttcatcacctcacgcggagatacttcggcagaaccaatcttgaagaatacggtacgcggtgcgatattcggatcggtaacgacaacttcagtttcagtaacttccaccggtttgttctgtgcagcggtcagggccgactccaactgttggttggcagcagccatttcagctatctgctgttgcatggcagacagctcaagagcggaaatcaattgtggcgtcggacggttgaaaccacgtttcgggaagtggtaagtcaaaccaagcgttgcactgaacacaccatcataccccttaccggcaactgttccgtcaaatttatcttcggctcccattgcactaagttccaaattaatatctattgcatttgaaatgcgaaagcggttgatgataccggcattcagagcaagtgcctgacggtgaggcttcgtatagttatgagtgagaccggcacccagataaggaatgatttcatatacacggtcttcgttgtatccgccaaacaaggcattcaggttgaacattacatcaccgtggaaattcatgtaatcaaagcgttgcttgtacgaaccattcgcacgctgagtaccctttacataatcagcaaaggggtccatggtaaagccttttgcctgaaggccgctatactgcaaacgtaatccgagccccggagtaaaccatttacccacagaaatattcatcgtgggactgatgcgctttccgaaatcacccaactgctggtcgttatctccatacattaccgatgcaccgccaccgatagagaaaaaccagttgctccagaatggatttgtgattacctggtacttatcctgtacctgaataatgtcaacctgctctacaacaacaggtttttgttgtgccatagtggcagcagatacgccggccaaagccagcaacattagaatctttttcatataccttaaaatagttaagttggttaattaaattctttatcattcaaactgattaattaacgccgacaagactaaaaggttctgaaaaaaagattttttttaattgttatggataaataatgtacaaatcatcatttctggaacaacttttcaatatcctcttccctgatagtggaaagcaccgtacggccatcaggcgtatagctgggcgtggaacaggcaaaaaggctgtctaccaaattggacatctcatcattgctcagcacctgtccgtaaacgatagctgctgcacgcgccagtgtcagcgcaaggattgtccggacttcttccttgacgtcactacctttctccatagcggtatgtaccatattgcgcaccagttccaccggattcaacccctcgatgccggaaggaataccattgatagcgtagctgccgccacctaaaggactgaggtcgaaaccgactgccgccaaatcgtccgacagactttccaacaccgcagcttcggaaactggtaattgaatcaattccggaaataacacaccctgagatactccctgcctttggcgaatttgagtcatgtaccggtcgaacagcacacggacatgcgcacggtgctgatctatcaacatcaggccggattttacggaagtaaggataaaacgtcctttgaattgcaaatgctgtgcccccttctccatggaagaagaatcaccggagtacaaagaagaagattgggaagcgggctcaacggcttccgttacagcggaaaccgcctcctcgaaagcaagcggttcttcctcgacaggctcattcattctacttgctttctccaaaccggaatacagtccctcccactctacactttggcgcggataacttcctccgctgctataagaagaggcagaggaagtcttgaaaggattgaagtccgcattataatgcaccttaggcggttcgatgggacggctctgctcaaatgccggaatgtcaggcatgccctctgtatcaaagtctatggacggtacagcattgaattttccaagcgattccttcacagccgctgaaagtatctgccaaatagcctgctcgttctcaaacttgatttccgtctttgtaggatgaatgtttacatctatattcgcagggtctacctcgaaatagatgaaataggatatctgttcaccggcaggaatcagttgctcataggcatccataactgccttatgaaaatatggatggcgcatataacggccgttcacaaaaaaatactggtgcgcacctttcttacgggatgcctccggctttgccacaaaaccagaaacttttatcatcgtcgtgtctacatccaccgaaagcaactgctggttcaacttcttaccgaatatggcgagaatgcgctggcgcaacggcatgacaggtaaattgaacaactccgcatcattactatacagatagaaagcaacatccggatgcaccaaggctatgcgctcaaactcggcaagaatattgcttaattccgttgaatttgctttcagaaacttacggcgggcaggaatattgaagaataggttcttcactgaaaagttacttcccttaggacaagaaacggcctcctgactctctactttggaaccggcaataaccagacgcgtaccaagttcttcaccagccggacgggttttcaactctacctccgccaccgccgcaacagacgccagcgcttcaccgcgaaaacccattgtacgtaacgcaaacaaatcagaggcctcacgtatcttggaagtggcatgacgctcaaaggacagacgcgcatccgtttcggacattccttttccgtcgtcaataacctggatgcaggtctttccagcatccgttaccaaaacatgtatttcggtggcttctgcatcaatcgcgttttctaccaattccttgatgacagacgccggacgctgaatcacctctccggcagcaatctggttcgcaaccgaatcgggcagcaaatgaatgatatcgctcatgataagtataaagtataaagtatgaaataaagggtacagaaaaaattagataataccgttggtaatggcataccacaaatatatcagcaatgccacaaccaccagtatcacccccagatgcaccggtctgcgtccgctttccttacgacgtttcagatgggtagtgccttcaatgaacttcccccggatatcttcgggcgaaaattccttttccggcaacatgcctaactcgcgtttggcatcttcctccattttggccagtttctctttccgttcatctacataaatgtatgaatgatgaaatccccgcggcttacgcattgcaaacattcccatagcattattttttagttcgttttatatgcatatctcttggcgaagttaaaggtttccggtcacttttctgcaatgtttcacccgcttttttaccccgccactcaaagatgtcatccttgttcaagggacgaatataatcaaaccacacaaatgaaggaagtttcatcttgtcggccggtatttggtccataggatacaatatgccgttggacttgcctatcaatgcagcttcttccattttacggtctttgagataaatacgcaggaaactgccttcggcatagttcatgccaatcattgtactgtctttctcttccggatagaacacaatcaggacattaccgttcacatctacccggcgcatatttccgtcctggaaaaaagctttcatctccttgcctgtcacttggttataatggatagaatctttctgttccacagccagcgcctgatcaatgatgtgcgcccagtcgatggtgctgtcgttcatgtagacctttacctcttcaccgagcaactgctgcgcaccgtgccacaaaacagggtcggtatacatcgtcaaacaggaatccttggaattataaaccaaagaatcgcacactgcctgcacatctgtgcggtaagcacgcaccttgtgataaacacgcatttcacgataggcagagtctgtattcatgtggtaagttaccaaacgcagtgtatcaccatgcataaaaagactgtcaccctgagaatagtctatagcaacggcacgttgggtagcaatggcattaccggttagctcattataaaaacagtaattgccggtaagcatattcttgtttaccgtatcattcatctgtacgttatcgaaagcttcaccataacccagcttgcggtcatagaaaagactgtctccggtaagtttcttgccttcattagtcaaaatggaacggtccaacagctctgcttgctcggatacggtattgtattctccacgctccgaatagatatggtttttatcactgactatatcggaaggccccagaatcgtagcgattttggactccgtactgtactttaacgtatcggaagtcaggacaaacttcggatttaccaatttcacttcatggttgaacactgccagtttggttgccgggctgtattctccccattcggaagtcaggacattttcttcatcggtcagcgtaccgccgtcaaagtaatatcctaaattatacagacggtcatagttcaagctatccgtagtaagttccgtattgcggttaatcatacggacattctcacgcagcatggcaagctgggacataccgtcataatacaagtaatcaccgtatatgaacaaagtgtctccctgctccatacgaacattaccgaatgcttccacagagttaattttctcgtaaatcagagcactgtcacaaaacatgtacatactatcgtgcttcatcctgaccgagccaatcagcacctgcacatcagggcgcaactgctgatccgcctgcgcctcatcggcgtaaagcaaatccacacgtttctttttcttgtcaggctcacttttcctgtcctgcgcgctcaacaaacaaacgccgaacaaacataccaaaccaaatatcagtcttttatccatcccggatacttgaatgtacagtttctccaattttcgttgatgcgaacgtaagtgtgtttctgcttttcacgaatccacttgtccagcatttcatcccgacgtttctccagaacaatctctttcaggttctggtagtcatcggcaacggtagccttatgtccattggtacggctcttcaacttcacgatgacacattcttcttttccggttttctgcggaatcatggtaaatgcttcagaaatctcgccaactttcatcttgtctaccacttttgcaatttcaggcggcagctcctgcatctcgaatttggaggtattggtattggggttaggcagcaaaccgtgattattgcgtgtatctttgtcttgtgaaagcaccgatgccgcttcctcaaaagagaacttcccgttacgaatatcatcggctatagagtccagacgagccatacctgctgtcaaagattcttccggaatatgcggtttcagcaatatatgacgggttttaatacggtctccacgcttctctatcaactgaatgatatgaaaaccatattcggactccactattttagagaccttattggggtcttgcaagttgaaagcaacattggcatatgccggatccagcataccacgtccggaaaactcgatttctccaccgcgaatggcagaaccacggtcttccgaatacatacgagccaacgtagagaaactggtctcaccctttgttatacggtcggtaaaatcgcgcaagcgtttctttacgttttctatttcttccaaaggtactttcggctgctgggtaattatctgcacctccacctgcgtcggtatatagggaatactatcttgcggcagatctttgaaataacgacgcacctcggccggcgtaactttgatttcaccaaccagtttctgctgcatcttctgtactttcaacccttcacgggcattttcccgcaatgtttcacgaatctggctggaagttttattgaagtattcttccatcttttcacgtgaaccgatattgctgatatacatatttgtcatataatccacacgctggatgacttcggattcggaaacttcaatactgtcaagtgccgcctgatgcaagaacagcttttgtacggctatctcttccggtatcacacaataggggtcccggtcgaacttacgtccttcgtacaaagcgctcatacgagcttcttccacttcggactttaatatagcctcgtcgcccactacccacacgacctcgtcaatcacattgtcttgtccataaacggtagaaccggctaacagcgtcaaggcaaataaaactacaaacttaaagttcatacacatcttcattcttggtatcttatactaataatacttaattttatcttttttctccgcacgctgatacaaatcttctttcacctgcttcataaaattcacctgcttcatgttcagcatcatatccttcacctgactacgggcaaactcatacggttcctgttctcccacagcacgataatcgctcacattcagaaaataatgaaaagccgtatctttcagttccacgtggcggttcttattcagatattctccggcatcgggcactttcagcggcatcaagtccatcacttcggttatcggaacccacttgtcataaaaatactcgtacttcacggcattctgcagactgtatttttccagatgctctacggcctcgcggttttcggtcctgtaccaacggcgaacactgcccagttgaggggctgtgaggggaactttgataaacaatccctttatcaaaggactctccaccttaaaaagctcttgatgcttctcataataatcagccagttccgtttccgaaatttcttcagaaagagtttggtttatcagcgcctgctggtatgcatgcataatcaacgccttccggtaattctccaccagtttgccaatctctccgctgttgggaatattactttgtgccttctcatacaacagcacatcttctgcccaattacggatgtaatgctccgcaaacaacaggctgtcatctttcgacaaccctgcgggaagcaccgcctgcaggtcttcatggtaaaggaagttaccatccaattccactaacggtgttcgccctccatgatcgtgctgttccttgcacgagccacagaaaagaaggattaaaagtcccaaacaggttgttcgcattaccagctgatatttactacattttaaggtacgaagatacggctttaatcggttgcatcagtgattattaacggtttttaaaacctcttggttaatttcaaccttagccgaggtgcgcaaacgggttatccactgcttctccagacaattccgataatcagtaaccaccctgtcttttacttcccgatagtcatccggcgctttcaccttcttacccagcacggcagtaaaagggaatgacaccataggcgctgcgtccttgcccttaaacaccaaatcatcgacatatacattgtcaccggaagcgaatgttccctgctccgcctgtatctgaggctgtgcaccggcattaaaagtcaagcgaatcgcatctttccattcttcttccggcagactcttcaaaaatttacgggcttgtttgacaatacgtttgcttactccgtgcagaacaatacctttataccgctgttccctccactgatagtcggaacgatgtttttcaaaataagtttgcagactggcctcatctgacccgattcgtttatggatttcctgtccggtgattttatccagcaacaagcggttcctatactcctccacctgataacgtaattccggatatttccgttccaaacatacattttcataatcaagtacagttttcattacaaaagcatccagctgcctgcgtataccagccggatatgctgctgcaaaacgaacaaagtcatttcctgtataattctttcctgccaatgtaaacagcgtacgttttgtttgtcctgtacgtatcagttcgtccatacccgttttgtcgggagcatacccatattctttcttcagcttctccacctgtgcttcaactccccaatcagtcccgtggcgatgagcccgacaaacctccattccattcttcacatcgtcaaaagacagcatttccattcgctcaataactttcacaatatgaatgccttgcggcgtaaaaaaaggctgggacacttcgcctgccgataactcaaaagctacattctcaaactctaccggcatttgcagccaactcacccaaaatggctgtttctcatcagaaaaacgttttacgcaggcatcaaaagcctcgggtgtctgattcttccggagatattcgtaaatggagtccatgccggcaatagctttacgcaatgcatgaccggatacattttgaggaagatacttaaaaatatgactcacacggacgcgtcccgcatgatgactggctttcattttatcatacaaccggcgggcttcattttcaatgacagccgtatctgtcagatacgattttatcaaccggttgcggtaattttcaaccttctcacgaaacgaaagagccgtatccaaaccggctgtctcggcagcagatactttcaacttgaagtctacaaacttctccgcatacttttccggtgcaacatacccggaagcaaacgatgccgcatccttgttataataatactcaaactcagaacgcaacacatcctttccattgacacgcatcaacaccgggtcctgctgggaaaaagcaaaccagctcactccggaaaaaatcatcaccaaacaagtccttatcataaccatctgtctaaaataggcaaaaccaataaacaagcaagttcacaaagatacaatatcataaacaaataatgcccgaaaagtataatttactctccgggcatatatctttatggatgaatatccttattcgggacggctataattcggagcctcgctggttatcgcaacatcatgcggatggctttccaacacaccggcattggtgatgcgagtgaatttggcatcatgcagcttctctatattggcagcgccgcaatatcccatacctgcacgcaaaccgccggtcagctgataaatcacttcatacaaagttcccttataaggaacacgggctgcaataccttccggtacgagcttcttcacatcgctcgttccgctctggaagtaacggtctttagaaccatgctccatggcttccaaagaacccatgccgcgataagacttgaatttacgtccgttgaaaataatcgtttcacccggagattcttctgttccggcaaccaatgaaccaatcataaccgagtaaccgccggcagccaaagccttcacgacatcaccggaataacgcaaaccgccatcggcaatcaaaggaatgcctgtgcctttcagtgcctttgccacatcgtacacggcagacaactgaggaacacctacacctgcaacgacacgagtggtacaaatggagcccggaccgataccaacctttactccgtccgcaccggcctcaaccaatgccttggcagcctctccggtagcgatgttgcctactactatatcaatattcggaaaacgcttcttagcttctttcaatttttctattacatacatggaatgcccgtgcgccgtatcaattacaatagcatctgctccggcatcgaccaatgcctgcatacgatccaatgtatcggctgtcacacccacaccggcagccacacgaagacggcctttgctatccttgcaagccataggtttgtctttagccttggtgatgtctttataggtaatcaaacctaccagtttattgtctttatcgaccaccggcaacttctcgattttgtgctcctgcaagatttgagcagcagcttccaaatcggttgtctggttggtggtaacgatgttgtcttttgtcatcacctcatcgatacgcttgttatggtctttctcgaaacggaggtcacggttggttacgattcccactaaatgtccttcatcgtccactaccggaataccgccaatcttatactcggacatcaagcccaatgcatcagctaccgaagaacctctcttgattgttaccggatcgtaaatcataccgttttcggcacgttttacaatagcaacctgacgggcttgctcctcaatagacatattcttatgaatcacgccaataccgccttcacgggcaatggcaatagccattttcgcttcggtaacagtgtccatagcggctgttacaaacggaattttcaactcaatgttacgtgaaaacttagtcgagagttcgactgttttaggaagtacctcagagtaagcagggattaacagaacgtcatcgtaagtcaatccgtccattacaatcttatcagcaataaatgacatagggctatgcgtttaaaatttattgcgtgcaaatatacggtttttattccattccgtatatttacacgcaatatttttttcttttttttatcgcagcccgaggattaatttgccatttcggagatgaacttaatacgtaccaaacgtacttcttcttctgtaaaatcatcccccagctcatccagagcatcatcgatattatctgtagtagattctttgaaatagtcgtatatatccaacagatggtcttcatccataatatcttccaggaagtagtcgatattcagtttcgtaccggagtagacaatagcttctatctcatccagcaactcctcaaactcaataccttttgacatggcgatatcgtccaaagccaccttgcggtcaatagcctgaatgatagcgaccttcatcttagacttgttggccacggtacgtacacgcaaatcttccggacgttctatctcgttctcctcacaatggcgtttaatcagcttacaaaactcttcaccataacgcttcgccttgccggctcctacccccggaatattctgcaactcatccaaagttatcggataaatagttgccattgcttccaaagaagggtcctggaatataacataaggcggtacttccaacttcttggagagcttcttacgcaagtctttcaacatggaatagagagccgggtctaccgcacaggcgccaccgccgcgtgccggtgcttcttcctccacttcctcgaaatcattatcttccgtaatcttaaaggatttaggatgcttcaagaatttcttacctgcatccgttactttcaacaagccgtagttttcgacttctttggtcaaataaccggcaatcaatgcctggcggataacagcattccaagttttgtcttcttctcccataccggaaccgaacacttccaaatcttcatgcagatgcgcctgcacttccgaagtttcttttccctgtataatatctataatatagtctgctttaaaattttcttttaccgcaagaacagtttctattacggtgcacaataattcctgagcttccacttgttttttcggatttaaacagttgtcacaatttccacaattttcttccgtatattcctcaccgaaatagtgtagcaacgtttttcggcggcaaacggacgattcggcatacgcagcggtttccagcagaagctgcttgcctatttcctgctctgcaacaggcttgccttgcataaacttttccagtttctgcaggtctttattggtataaaaagtaatacactgtccttcgcctccatctcttccggcacgtccggtttcctgataatacccctccaggcttttcggaatatcatagtgaatcacataacgcacatccggtttgtcaatacccataccgaaagcaatcgtggccacgatcacatcgattttttccataaggaaatcatcctgattctgtgttcgtgtggccgaatccattccagcatgataggcacgggcattaatcccgtttgcctgaagtatctcggcaagttcctctactttcttccggctcaggcaatagatgatacccgacttttccggattgttcttgatgaacttgataatatccttatctacgtttgcagtcttgggacgtacctcataataaaggttcggacgattgaaagacgacttgaacacctgcgcttccaccatacccagattcttttggatatcgtgctgcacctttggtgtggcggttgcagtcaatgcaatgagcggagctttcccgatttcattgataataggacggatacggcgatattccggtcggaagtcatgtccccattcagaaatacaatgggcctcatctacggcatagaaagaaatcttaaccgttttcaggaactccacgttctcttcttttgtcaaagactccggagctacatacagcagtttcgtccgcccggcaaggatatcggacttcacctggtctatcgcactcttgttaagggaagaattgatgaaatgagctattccatcctcctcgctgaaattacgcatcgcatcgacctgattcttcatcagggcaatcagaggagaaatcacaatggccgtgccgtccatcaacaaagagggtaactgatagcacaaagactttccaccgccggtgggcatcaacacgaaagtatcgttacccgccaacagattctgtatgattgcttcctgatttcctttaaaagtgtcgaacccgaagtagttcttcagctggtctgtcaaattaatcttcttccctgccatgattcattaggttgtttattgagttaagctattaataacgccgctacatgacgtttcttattttcaagaactctaacaaagttataaacaacttcttaaatttcaagcataatccgccgaatatttttcaataaaacacaaaaaagtctgctttatttgtattaccttttgattttaagcattttgaagtcttgccatattcgctttttccaactgggcacgggcatagtccaaagttactgtaaaaccatctttgtgttcggaagggatttcaaacatcgcatccatcataatggtttctacgatggaacgcaaaccgcgagctcccagcttgtattcaatagctttgtctacaatatactcaaacaccgcatcttcaaaagtcagcttcacaccatccatttcaaacaacttgacgtattgcttgattatggaatttttcggttccgtcagaatggcacgcaatgccgtacggtccaaaggattcaaataggtcaataccggcagacgaccgatgatttcgggaatcaggccgaacgatttcaaatcctgcggagcaatgtactgcatcatattattcttgtcgatggccgccgtattgcgcaccgccccataacccacgacattggtattgaggcgttgcgctattttcttctcgatgccgtcgaatgcaccgccgcaaataaacaatatattcttggtgttcaccggaatcatcttctggtcgggatgcttacgtcctccctgaggcggaacattcacgaccgagccttccagcagcttcagcaatccctgttgtacgccctcgccgcttacatcacgggtaatggaaggattgtcgcttttacgggctatcttgtctatttcatctataaacacaatgccttgctccgcttgcgctacgttatagtccgccacctgcaacagacgggtaaggatactttcgatatcctcgcctacgtaaccggcttccgtcagcacggttgcatctacgatagtaaaaggtacatgcaacaatttggcaatggtacgggcaagcaaagtcttaccggttccggtactgcccaccatgatgatattggacttttcaatctccacatcatcatcccccgctttctgcagcaggcgcttataatgattgtacacagataccgacaggaaacgtttcgcatcatcctgcccgataacatactgatcgagaaaattcttaatctctacaggtttaggaagttctttcagattcagtttcgtagcgccatcaccttttttggcatccaaagcctcttgagtaatctcataggcctggacagcacaactatcgcagatgtagccgttcatccccgttataaggaagccgacctcatcttccgagcgtccgcagaaactgcatctgttcttgtttcgtttagagtctgccatatttatttctttgtatagacttggtctatcataccatactctttggcttcctgcgccgtcatccaatagtcgcggtcggagtcggcccacaccttatcaaaagatgtatgcgaatggtcggctatgatagtataaagttctttcttcaatttttggatttcacgtgccgtgatttcaatgtccgaggcttgtccttgtgcgccgcccatcggctggtgaatcattacgcgcgagtgcgtcagtgcagaacgcttgccttctgctccggccaccagcaatactgccgccatactggcagccataccggtgcagatggtggctacatcgctgctaatgaactgcatggtgtcgtaaatgcccagtccggcatataccgaaccgcccggcgagttgatatagatagagatgtccttgcccgggtctacagaatccagatacagcaattgagcctgcagggtattggcggtatagtcgtctatctgcgtaccgaggaaaatgatgcggtccatcatcaggcgggagaatacgtccaattgagttacattcaactgacgctcttccaggatatagggatttaaatacccggcttgtgatttaatcacatcatccagcaccaagctgttcattcccaaatgcttggtagcgtattttctaaaatcatccattgtctttctctttttaattttttaatgtgaatgcaaagaaacgaaaaagaacacagagacacaaaaaaacacagagttatagtttgtcaaactctgtgtttctttataaaaatcagcggcttcccgccaaaatcttattcaaacatcttgttgaaatccgcagccgagatgttcttgttctccaacgttacctgcgttttcaaggctgaagccagtttcgtttcaacaacacggttcaccagaccttcgatgctttctttcttcttcagcatttcttttgcatagttgtcgaggatttcttcgggcacgctcagcataccgtactgtgcaaactgtgcacgggtagtttcctttgccatattaaggatgtcatcctgttcaactttaatatcgttggctttcaccagttgctctttaatcagatgccaagtcagttcttcgatgctcttgtcgtaattgtcttctacgaatttttcgtccttgtcctggttgttcagacgcataatacgcttgagcaacgcatccgggaattccaatttaccgactttttccatcagcatcttacgaacatccaacaggaatttataatcgctgtcagctacaaactggttggcgataacctctttcactttggcacggaattcttcttcggtcttgacaacgccttcgccaaatacctgatcgaaaatctcctggttcagctcacctgccacgaaacgggtaatttcctctacctggaagctgaagttggatttcatttcggcagcagcttctttgtcaaccttcagcagcgaagagagttcggctgcattgccatcccatgctgtataaggattgaatacgagtacatcgtttacctttgcattggcaaagatggctttctggtcgtcgttcttcatatatgccggcatcataacggcaccttccacctgaacgccaccttctttggtgttgccttctgcatccagttcggcgagcagacccttcaacatatcgttgtcggcataggcgtctaccttttcgtacttaccgttacgctgcgtataagccttcacctggttgtcaaccatttcttcggttacatcgatcgtatagtaatctactttatcgtctgcagcaacctcagctttgaattccggagccaaagcaatgtcgaacaggaattcaaattcttccattgtatcgaagtcgatagctttctgcttgtcttcattaggcagaggctcgcccaaaatattcaccttattatcttggatatacttatatacggaatcagaaagaagcttattaacctcttcagccaataccgacttaccatacattttcttcaccaggctcatcggaaccatgcctttacggaaaccggggatttgagctttctgacggaagttcttcaatgatttgtctaccttttcctgatagtctgctttctcaagctttacagtaagcagtgcgcttactttgtcaatgttttgcaatgaaacgttcattctgacaattatttatttgatttatactttatttcattctccaatttgagcgtgcaaaattaacgttaatcttttaattatcaaaaaacacaagcaattatttcctttgcctcccctaccgccaaaacttttccatcccgtttctttaatgcagtacctccgggcaatcttcccaataccaccgcttgatagcaggaataccacactgtggtagctgtcgtaccaaagggtggtagccgtcgtaccaaagagtggtagccgccgtaccttagtaaggtacaacgtgtaccaaaggaagaaattatttggtacacatgtcataaatcagcgaacacccctgaacaagggaataagcccgtatcaggaaaacatattgccggcaggcaaatacaacaaatccattaaaatcaaagaaatatatagatgagcggggcattctttccgccttatggcaagagaaataaaaataattgagaaaaagtattgtatatccgaaattaatgtgttcctttgtcgcagaatgatggcatattagtttctcgatttccattacatggtttttacttccgttgaaaaaacgtttttgtaaactctctgtcgttgcaatccttttattattcggctgtctttctaagagagttttattcatttttatattatttacatttttcgttatgaacatttatgttggaaaccttaactaccgagttaaggaagatgacctgcaaaaggttatggaggactacggcacagtatcttctgttaaatttatcatggaccgcgcaaccggacgtttcagaggcattgcattcgtagaaatggaagacagcgcagctgccgccaaagctatctccgaactggacggcgccgaattcttcggtcgtcagatggtggtaaaagaagcaagacctccgaaatactaatcatatagattaaaggagaaaataagaaagaccgtcttggacggtctttttttattgttataggcttattgttatatgctgctgcaaaaaccggctctacaccataaagtccttgcgacgaagcacaaaactgttactcaaatacttttcgcgtacaatcttattctcagcaagctcttcgggcgtaccttgaaacaggatttttccttcaaacagcagataagcacggtcggtgatgctcaaggtttcctgcacattgtggtcggttatcagaataccgatattccggtctttcaacttccagacaatctgctgaatatcttccaccgcaatagggtctactccggcaaacggctcgtccagcataatgaacttcgggtcgatggccaagcaacgggcaatctccgtacgacggcgctcgccaccggacaactggttgcctttattcttacggaccttttgcaaacggaactctgcaatcagactttccagcttatctttctgatagtccaaaggcttgtccgtcatttccaacacagccgcaatattatcttccacactcatctggcgaaacaccgatgcttcctgcgccaaataaccgataccagtctgcgcccgtttgtatacagggtattttgttatatccaaatcatccaaaaagatgcgtccttcattgggagttatcaatcctacggtcatatagaacgaagtagtcttaccggcaccgttcggtcccagcaatcccacaatttctccctgctttacgttgatagagacatggctgactaccgtacgctttccgtacttcttcaccaaatcctctgtccggagcaccattttgctttcttcttccataacgctatgtcaccacaattatatatacagattactatcagtcctcaatactgccgtttcttccccagattacaatcgtcttcatcctggtttcagcaaaaatactgtgccattcggcgtaatctgtggtgaaactggcgcaaatgtagcaaaaataagctgaaatagtgtacatttgcagacaaatacttacgagtcatgattaaagcacttagaacagtaggaagatacatcatattaatgggtcgtgtttttgcccgtccggaacgcatgcgtatgttcttccgccaatacatcaatgagatagaacaactgggcgtaaactccatcggcatcgtattgctaatatcattttttatcggagccgttattaccatacaaatcaagctgaacatagaaagccctttcatgccacgctggacggtgggatatgtcacccgcgaaattatgttgctggagttctcgtcctccatcatgtgtctgatattggcaggcaaagtaggctcgaacatcgcttccgaacttggaacgatgcgggttacccagcaaatagacgctcttgagattatgggtgtcaattctgccaattacctgatattacctaagatagcggcaatggtgtcaactattcctcttatggtaacgttcagtatattcgccggcatcatcggtgctttttgtacatgctggttcggcggtatcatgtcggccgtagatttggaatacggtctgcaatacatgtttgtagaatggtttatctggtgcggcatcatcaagtctctgttttttgcctttatcattgccagcgtatcggcattcttcggttattcggtcgaaggagggtctatcgaagtaggtaaagcatctacggattcagtggtatgcagcagtgtactgattctgtttgccgatctcatactgacccagttgctaatgggctgacaagttgattctaaattcaaaactaagtaagaatgattgaactgaaaggactttgcaagtcatttgaagagaaagaggtactgacggatatcaatgccacattcgaaaacggaaagaccaatcttattattggccagagcggttccggaaaaaccgtactgatgaaatgtatcgtaggcctgctgacacccgaaaaaggtgaattattatacgaccaccgcaatttccttaccatgggaaagaaagagaagaaagccctgcgccgcgaaatggggatgatattccaaagcgccgccctgttcgactcgatgacggtactggacaacgttatgttccccctcaacatgttcagctcggataccttgcgcgaccgcacgcgccgtgccatgttttgcctggagcgcgtaaaccttattgaagcgaaagataaattccccggtgaaatcagtggcggtatgcaaaaacgagttgccatcgcacgcgccattgccttgaaccctcaatatctgttctgcgatgaacccaattccggcttggaccccaagacgtcgctcgtcattgatgaactgatacaggacattacccgtgagtacaatatgaccaccctcatcaatacccatgacatgaactctgtaatgggtatcggagaaaaaattatctacatttatgaagggcacaaagaatgggaaggcagcaaaaacgatatttttacatctaccaatgagcgtttgaataattttatttttgcttccgatctcttccgtaaagtgaaagaggttgaaatacaaaacatagaaggctaaggctgtaagaacaactgtattcctaaaaaaagtgtccgggaccaccgccccggacacctatcctcataaaaccagttaatagaattgatgtatatcatcacgatatatttttattgcagcaaccaaaggtagcagcaatctcaattacagctacaaaattaggtaaaacaatctaataaaaaaagcaaaaaaaagactgagtcaatatgaaccagtcttttaacttttttatccaatatatacaggcttgtttttacttctgccgtatatatacatttatcggtgtccccgtcagattccatttctcacgcattttattttcaaggaaacgtctatatggttcctttacatattgcggcaaattggcaaaataaacgaaagaaggaatttgcgtattcggcaactgcgtaatgtattttattttgatatacttacctttgatggcagggggcggataagcctcgataagcggcaacatctcttcattcaagcgggcagtcggtatgcgtatcatacggttctcatatacagtacgggcttcttccaatactttcaggatacgctgtttagtcaatgccgaagcaaaaattatcggaaaatcgacaaaaggagcaaaacggttgcggattgcattctcaaaagttttcattactttcaccgttttatcttccaccaaatcccacttgttcacaactaccaccagccctttagagtttttctggataagtgagaagatattcaaatcctgactctcgataccgcgtgtagcatccagcatcaaaatgcagacatccgaattttcgatagaacggatagagcggataaccgaataatattccaaatcttcgttcaccttgttcttcttgcgaatacctgccgtatctaccaaatagaaatcaaaaccaaacttattgtaacgggtatagattgagtcacgggtcgttcccgctatttccgtcacgatattgcggtcctcaccgatgaaagcattaacaatggatgactttccggcattcggacgtcccactaccgcaaaacggggaatatcctcatccagaatttcatcagactctttcttgaaattctcaacgataaggtccatcaaatcgcccgtaccgctaccggtcactgccgaaatacagtatggatcacccaaacccaaactataaaattcgggagcattatattgcaactcattattatcggtcttgttcgcaaccaataaaaccggctttttggtacggcgcaaaatggaagctacctgcaaatccaaatccgtcactccgttcatcacatccactacgaacagaataacatccgcttcgtccacagccattaacacctgcttgcgtatttcctcttcaaaaatatcatctgagttcacaacccagccaccggtgtctacaaccgaaaattcgcgccccagccattcggactttccatattggcggtcgcgtgttgttcctgcctcttcgttaacaatagcctgtcttgttttggtcaggcgattaaataatgtagactttcccacattgggacgtcctacgattgcaactaaatttcccataggttacactctttgttttttgcgactgtcacagtcgtatgaatattagtccagctgataaccgaagttacgcagttccttgtccgaactgcgccaatccttgtcaaccttcacaaatgtctccaggaatattgttttcccgaagaatctctccaaatcacggcgagcctcggtggccacttttttcagggccttcccctgcttaccgatgataatacctttctgcgaatcacgttcaacgtatatcacagcattgatatgtatcttcttttcttcttccttgaattgctctacaacaacctctaccgaataaggtatctccttgtcataatataacagtatcttttcgcggataatctcgtttacaaaaaaacgggccggtttgtccgtccactgatccttatcgaaataagggggagaatccggcaagagttcctttatccgcttcatcacgtaatccacattaaacttggtggcagccgaaataggaataatctctgcgttcggcaacaattctttccatgcctccaccagttccaccagcttttcctgattgctcaaatcaattttattgacgagcaacaatacaggtacttccatgcggcttaccttctccacaaaatcattatgcttgtcaggtgtctcgaccacatccgtcacatacagcaacacatctgcatctgtcaatgccgaagtggagaagttcagcatagactcttgcaatttataagtaggtttcagtacgcccggcgtatccgaaaatacaatctgcatatcatccgtattatatatacccataatccgatgacgggtggtctgcgctttgaaagtggcgattgaaatacgctcacctaccagtgcattcatcaatgtagacttacctacattgggatttcccacaatattgacaaaacctgctttatgcataatcctcacgtatttgaattgagacaaaaaaacgcatcgaatcgaaataggatgcgtctttttatcatattttgtttgtaacggttacattactgtttcttaccgtcataaccccatttcacgtaaacagctccccaggtaaatcctgctccgaatgccgtaaagataaggttatctcctttcttcagcttctcttcaaagtcccagatacaaagcggaagcgtacctgcgctcgtattaccgtagcggtcgatatttatcagcactttctcatgaggaacttccaagcggtgcgccacagcatcgattatgcgcagattggcctgatggggaaccacccagtcaatcgtatcttttgtcagattattcttttctgcaatcgcagcgcttatatccgacatgttggatactgcatatttaaataccgtgcgaccctcctgataaaggtaatgcatgtgattgtctatcgtgaaataagaaggaggacaaacagaaccgccagctttcagatgcaggaaaggcaatccctttccgtctgttctaagcatagcatccataacgcccagttcttctgttgtcggttccatcataaaggcagccgcaccgtcaccgaaaatcggacaggtagcacggtctgtatagttcacgattgacgacatcttgtctgcacctacaataataactttcttgtatctacccgaacggataaagttcgcagccgtctccatcatataaaggaaaccgcaacaagcggcagacatatcaaatgcaaaggcatttttcaatccaagcttgtcgcacaagatagatgcaatagaggggaattgatagtccggagtggaagtagcgacaatcaccaggtcgatgtcatccggattggaaccgatacgctgcattaattgctttgcagccttgcgtgccatgtatgatgtgcccaaaccctcttcattcaggatgtgtctttccttaactccgatacgggtcataatccattcatcattggtatctaccattttggatatctcgtcatttgtcaagatataatcaggcacataaccgccgactcctgtaattactgcatttattttttccattaatcttgtttacttataaagatacttaaacaacggcagtctaaaaaggtttgttcattgaatgctacaaatcttttcagacgcccgatattcaagtataagtttagtcaaactgcccaattaaacagcagcttctttctctactgccagcttaccacgatagtagccacatgcaccacatacagtgtgatatacatgccattcaccgcaattcggacaaatagccagtgtaggagctactgctttatcatgagttcttctctttgcagttcttgtttttgactgtcttctcttaggatgtgccattttctttaatctttaattgttatctaatattttttttaattcgtcccaacgcgggtctaccgctgtttccgtatcatcatttgcaagttcatcgctgtcctccgaaacaaaagaatcttcatccatctcatcatccggggtagtacgcaaatgcttgctcaatttactactcattgccttgttgcatttgcccggagcgtgtacatgcttcatcgggattgccaaggctataaactcatacatgaaccacgccacattgatttctccttcttcttcaggtatgacaatcagattatcaccctcttcggcatattcatgtccgaacttcaccagcaacttatctgtagaacttaccggctgttccatgtcatccaaacagcgatcgcatggaacccacaccattccgtctgtctgaaaattcaattcgaaagcacgagatgttttctttacaaccaaaacaacattgactttgcccttctgcacctccggaccgtcaatattagcgaagaaaaggttatccaatacaaattcatatttgcatgaatctgcctgcatacctttcaaatcgattttgtatttatcaaactttcccaaagcttcttttatttattcgggcgacaaagatacaaataattatcctcattatgtagtaattagaacaaaatattcactttttatattcatttcaccctgtttcggtcaccgataagactgatttatatggtataaaaggaagcgtaacagtacacagagagtgaaatattacttttcacaacagagaatacaaaggattctttcaggcataaaaacggaaaaacatacttatcaaaaaggcgataggatacagttggaatataatgcgaaaccggtaatttcaggcaaaagagcataaatcccctaaaagcagggacacagcttagcctgctcttacgcctgtatagcaaatcttctttattaaagggatagagtaaagtaaagggttagctcagtgcccgaaatacgctgtagtacggatatgataagatataagttccggcattctatgggatactcattcggtacgggaaaggaaagggaaatttcaaaacctgtttaaagagacataaataaaacttctcctcacataagagacagagccttttttcagagataagaacagaaagacataagaggagatgcttgccagatatatgatgtgatacgggtataatacgatataataccctaaaagcaaagaaagaaaaatacttcacaagtataagaataatccccactaaaaatctgctgaccccaagaaagcaagcaaaacaaggcaaggcagacaaatgaacttaacttctctgttcggaatgatagcccaaaaacaagaaagcccctgcatcttccgatacaggggcttctctctaaaaaacggcgactacctactctcccactgttacgcagtaccatcggcgtgactgagcttaacttctctgttcggaatgggaagaggtggaacctcagtgctatagtcacctgaataaggcagacatgatgtaaaaagtaaagaacaaccggtaatgaaaccggtaaactgaacgtatataccacccatacacggaaagaccaaaagtgaacgggcaattagtaatgctcggctatgacatcgctgcctgtacacctgcatcctatcaacgtcatcgtctgtgacgaccctaagaaatctaatcttgtggctggcttcgtacttagatgctttcagcacttatccaatcccgacttagatacccggcaatgcacctggcggcacaaccggtaaaccagaggtcagtccaacacggtcctctcgtactagtgtcagagccacgcaaatttcatacgcccacgatagatagagaccgaactgtctcacgacgttctgaacccagctcgcgtgccactttaatgggcgaacagcccaacccttgggaccttctccagccccaggatgtgacgagccgacatcgaggtgccaaacccctccgtcgatatgagctcttgggagggatcagcctgttatccccggagtaccttttatcctttgagcgatgtcctttccatacagaaacaccggatcactatgctctagtttcctacctgatcgacttgttagtctcccagtcaagcgcccttatgccattacactctgccgacggttaccaatcgtcgtgagggcacctttagaagcctccgttacgcttttggaggcgaccaccccagtcaaactacccaccaaacagtgtccccgcagccgcgggttagaactcaaataatcaaagggccgtatttcaacagcggctccacaaatactggcgtacctgcttcgaagcctccggcctatcctacacatcaattacccaaattcaatgttaagctatagtaaaggttcacggggtcttttcgtcccatcgcgggtaatcggcatcttcaccgatactacaatttcactgagctcacggttgagacagcgtccagatcattacaccattcgtgcaggtcggaacttacccgacaaggaatttcgctaccttaggaccgttatagttacggccgccgtttactggggcttcaattcaatgcttctcttgcgatgacatctcctcttaaccttccagcaccgggcaggtgtcaggctgtatacttcatatttctattttgcacagccctgtgtttttgttaaacagttgcctggaccgattctctgcgcctcaagtcaccctgaggaccctttatcccgaagttacagggtcagtttgcctagttccttaaccgtgaatcactcaagcgccttagtatattcaacccgactacgtgtgtccgtttgcggtacgggtaccacaaggattaagtttagcggattttctcgggagtatgcttacgtgcactattggattgtcccgaaggacgctccatactatcaggttcgactcttcctgcggatttgcctgcaggaatcaacatctacaccctttaacggactattccgtcagtccacggcactgtcactgctccgtctccacgtcactccttgaggtagtaccggaatattaaccggttctgccatcggcctcgccgttcggctgagccttaggacccgactaaccctgatccgattagcgttgatcaggaaaccttagtctttcggcgagggggtttctcaccccctttatcgttacttatacctacatttgcttttccacacgctccagcaaggctcacgcctcaccttcaacgctgagtggaatgctcccctaccgatgtttacacatcccaaagcttcggtagaatacttaatgcccgattattatccacgccaaactcctcgactagtgagctgttacgcactctttaaatgaatggctgcttccaagccaacatcctagctgtcttagcaatctgacttcgttagttcaacttagtattcattttgggaccttagctgttggtccggattgttctcctttaggacatggaccttagcacccatgccctcactcctgacatagaactgacacgcattcggagtttgtcaagacttgataggcggtgaagccctcgcatcttatcagtcgctctacctcatgccagtataagtcaaggctgcacctaaatgcatttcggggagtacgagctatctccaagtttgattagcctttcacccccaccctcaggtcatccagaagcttttcaacgcttattggttcggtcctccagatggtgttacccatccttcaacctgcccaagggtagatcacttggtttcgcgtctactccttccgactgaacgccctgttaagactcgctttcgcttcggctgcaggtctcaagacccttaaccttgccggaaaaagtaactcgtaggttcattatgcaaaaggcacgccgtcactcgttagagctccgaccgcttgtaggcgcatggtttcaggaactatttcactcttctgttcgaagtgcttttcacctttccttcacagtactggttcactatcggtctctcgggagtatttagccttaccggatggtcccggctgattcacgcagaattcctcgtgctccgcgctactcaggataccactaggcttcgactggcttcgtatacgcaactatcatgctctatggttgaactttccagaacattctactcaccagttttcttgccacaacgtggtcctacaaccccacatatgccgtaacataggtggtttgggctagtccccgttcgctcgccactactaggggaatcattatttattttcttttcctgcaggtactaagatgtttcagttccctgcgttagcctccaacttggttggatgattggccttcaaccaatcgggttgtcccattcggaaatctccggatcaaaggttatttgcacctacccgaagcttatcgcagcttatcacgtccttcatcgcctccgagagccaaggcatccgccatgcgcccttgcttacttttagtcttaccgacaacgtatggtcgatatatactttcagctttaactttacttttttctgttacatcatgtcaaagatcgtttgagaatattccgatttaacggaatctcaagagtggagaataacggattcgaaccgttgaccccctgcgtgcaaagcaggtgctctagccagctgagctaatcccccgagatagtggttagtaatagacggtcagtgattggtaattagtaattagaattagtaattaaaatcgtccgtgtctctcaccaagactatgtcgtagtcccaggcagagttgaactgccgacctctacattatcagtgtagcgctctaaccaactgagctataggactgtcagtcaaaccctagcccgaaggctcggcttctactttctctttatattattaataaacaatcttcgcagtacaagaggttcttatggaggtaatctctttagaaccaacttttcgtctttttctgagcgtcgctccagaaaggaggtgttccagccgcaccttccggtacggctaccttgttacgacttagccccaatcaccagttttaccctaggacgctcctcgcggttacgtacttcaggtacccccggctttcatggcttgacgggcggtgtgtacaaggcccgggaacgtattcaccgcgccgtggctgatgcgcgattactagcgaatccagcttcatggagtcgggttgcagactccaatccgaactgagagaggcttttgggattagcaccacgtcgccgtgtagctgccttctgtaccccccattgtaacacgtgtgtagccccggacgtaagggccgtgctgatttgacgtcatccccaccttcctcacatcttacgacggcagtccgggtagagtccccagcataacctgatggtaactacccgtaagggttgcgctcgttatggcacttaagccgacacctcacggcacgagctgacgacaaccatgcagcaccttcacaactgtccgaagaaagaaccgtttccgattcagtcagttgcaatttaagcccgggtaaggttcctcgcgtatcatcgaattaaaccacatgttcctccgcttgtgcgggcccccgtcaattcctttgagtttcaccgttgccggcgtactccccaggtggaatacttaatgctttcgcttggccgctgactgtatatcgccaacagcgagtattcatcgtttactgtgtggactaccagggtatctaatcctgtttgatacccacactttcgagcatcagcgtcagttacaatccagtaagctgccttcgcaatcggagttcttcgtgatatctaagcatttcaccgctacaccacgaattccgcctacctctgttgcactcaaggtcgccagtatcaactgcaattttacggttgagccgcaaactttcacaactgacttaacaacccgcctacgctccctttaaacccaataaatccggataacgctcggatcctccgtattaccgcggctgctggcacggagttagccgatccttattcatacggtacatacaaaaagccacacgtggctcactttattcccgtataaaagaagtttacaacccatagggcagtcatccttcacgctacttggctggttcagactctcgtccattgaccaatattcctcactgctgcctcccgtaggagtttggaccgtgtctcagttccaatgtgggggaccttcctctcagaacccctatccatcgtaggtttggtgggccgttaccccgccaactgcctaatggaacgcatccccatcgacaaccgaaattctttaataattatcccatgcggaataattatgccatccggtattaatctttctttcgaaaggctatcccagagttgtcggcaggttggatacgtgttactcacccgtgcgccggtcgccatccatcaaagcaagctttgatgatgctgcccctcgacttgcatgtgttaagcctgtagctagcgttcatcctgagccaggatcaaactcttcattgtaaaagtattgttaatcattccatataggaatggttgttgctctgttcaggacgctcgaatttaaaaagtatctattacctatttaataagtaatgacggttctttttattttacccaagaccgtttctttttcagaaacaagtcttgctcttgtactacttgtattgtttatgtaaatctcttcaaagatcgcttcttttatgtcggctttcttttcaggaaagcggatgcaaaggtaaaaacttttaagtatatcttccaaatattttcggaagttttttttcatctttcctttttcccgtcatctctcttgcgaaagggagaacaaaagaaagattgttttaccgacccggattcaagaaaaagtgtgtcaaccaacgctgcttactttttgaaagcgggtgcaaaggtaagaactttatttcatatcttccaaatgttttcggaagtttttttttcattctgctttttcaaaaggaaatattcagaaagaaacaagccccaagcagaagaaataggtaagagttcctacaccgttcctgtcagaatgtcaaaacatcgctgctcccgttctcgaaagcgggtgcaaaagtaggactttataacatacacaccaaatatatcaggggattttttcgagtttctcttgaacatttttataaaacgctgattgacaaatgtgttgaagaacatattttttaaggaggatgaaaagccaaacaaaagggacacattataatatatgcgcatgcgcgtggaaagaaacaacggaaggctgaaagaaaacacggagatacggaagggcattgtatgacacccgggtcttgacatgttcgacacccgggtctcggcacgtctgacacccgggtcttggtatgcacgacacccgggtgtcggacacaagaaaaaggctaacaggactaacggcacaggaagaaaacaatacggacacatacaaggaaaagaaatacaaacagaaaaacggcagagaaaaagatacaaaaaaacaacggcacagcaaaagaacagacacataaaaaaggagaaaggcggctgacagcctggaaaacacgaagcaagccacaacccaacaaacctgttaaagaaagacgcacgttgtattaaatgttaacagaagcaacagtctcataaaccgtgttaccaaacaacagatttccagaaaaaatattggataataccaggaatagaataactttgcaatgtgtttttcatagtattagatttaaggttaacaaaaagattggctgtctgggagagatagccttttttttatgaaaaccatcctcgtgttttcatgcaatcattgttctttagcctcttcctgcgggatgcgtatggatgtataaagctcaagaatagcagcgatagtcagtgaaacaatccactcattaccacgcgtaaaaaacataaaagctccggtaagcaccaacaacaatgcaccaaatatttgctggcgtctcagacgcctaatagtaggagttttatattgcgaaggtgaatttatttgcgccaaagcaacaaatgtagcacctaccgtatatatataaggcgaaagttgccaacctgtgacataaacggcagctcctatcagaagcattacggctcctacaacaaagagggcgggtatcaactgtttcattcttctatatcttcttggaatacataaatatcttcattgggtttcttcatcagatacttttcacgggctatcttctcaatagctcctgaatcgaccgcaagttcattcagacgacgggtattctcctcatattccgcacgatatctatctatctccccgcgcaaacgcgtttcctcacgataataccccaaacgacgcacaatgctgttttcatccagaaatccgacaagtacgacaaacagcacaaacgttatcagatatttacgtctgcggacaaacaaccaaagagaagcaagtttatccatgtaatccagttattgtttctttgagcacaaagataagacgaataactgagaattttcttttttttgcgtacatttgcacaaaagcaaagataaaccatacaacctttgcacgctatataagtgacaagaataccctgaatatggaaaattatatcgtttcggcacgaaaataccgcccttcaaccttcgagtcggtagtaggacaacgcgctttgactactaccttaaagaatgctatcgccacaggcaaactggcacacgcttatctgttctgcggtccgcgtggcgttggaaagacgacgtgtgcacgtatttttgccaaaaccatcaactgcatgagtcccactgcagagggagaggcttgtaaccaatgcgaatcgtgtacagcattcaacgaacagcgctcatacaatattcacgagttggatgctgcatccaataattccgtagacgatatccggcaattggtagaacaggtacgtatcccgccccagataggcaaatacaaggtatacatcattgacgaggtgcacatgttgtcggcttccgctttcaacgcttttctgaaaacattggaagaacctccccgccatgccatatttatccttgccactactgaaaagcataagatattgccaaccatcttgtcgcgttgccagatatacgacttcaaccgcatcagtgtggaagataccgtagcacatctggcctatgtagcttccaaagaaggtattaccgccgaaccggaggcactgaacgtcattgcactgaaagctgacggtggtatgcgcgacgccttgtccatattcgatcaggtagtgagttttaccggcggacacatcacctaccaaagcgtaatcgaaaatttgaatgtactggattacgagtactactttaaactgaccgaccattttcttgagaacaaagtcggcgatgccctattactgctgaatgatgtattgagcaaaggattcgacggcagccatttcatcaccgggctgtcctcgcatttccgcgatttgctggtaagtaaagatcccgccactcttcccctgcttgaagtgggagcaagcatacggcaacgttatcaaacgcaggcacaaaaatgtccgttacccttcctttaccgtgccatgaaattatgcaacgattgtgatttaaactatcgcgccagcaaaaacaaacgattgctggtagagctcactttaatacaggtggcacaaataaccgccgaaggagacgacatagctaatgggcacagccctaaacaagtcataaaacctatatttacacagcctgcagccactcaacagccacaggctactcccgctgtaccccggccgcaagcacccgtcatagctaaaccgcaagcagttcctaccgttgctccctccaccggcactaccgccacaacagcaaatactgcttcgcacgccacccctacctccatcttgctggcacaaggcaaagaagaaaagaaaattccggttataaaaatgtcaggacttggcgtatccattaaacgcccgaaagccgaggaagaggtaaaaaatacggctacagccactatcacaccacaaacagcacaaccggaagaggactacatcttcaatgaaagagacataaactactattggcaagagtatgcaggacgtatgcccaaagagcaagtagccattgccaaacgcatgcagaatatgcacgtcactctactaaatgctactacttttgaagctgtcgtagataatgaaattgtggctaaagaatttatctcaatgactccccaattacaagagtacctacgtacccgcctgaaaaaccgcaaggtaaccatgagtgtacgtatcagcactcccactgagaaagtccgcgcgtacggccgtgttgaaaaattccaaatgatggttcagaaaaacaatgctcttttacaattgaaagacgaattcggattggaactttactaagcattataagtaaagaggctcaatattcacatacacgtcacaacttattgaaaataaaagcattatattttattttgcatatcgctttttatatttatttttgccaataatagacaaacaaagcaaacaatgagaaaagacgttgccgtattaatggtgctgtgggtgatgtgtataccatacgctacctttatatgtgcctcagccactccgaacaaattagatacgctgaaagcttttcttcgaaaaaaaatactttacgatgaatacgtaccgatagacagcgtcatttgctggagcgaaaacatcctaccggtcatcaagacaaacaatcggaatgacgaaaactactttttgctgcaactgcaacttgccaatgcctatacattacgaggcgacatcagcctcgccatagaccgggcacgactaatgtacgaagaagccaaagaaacggaatatgagttcggaattgcagttgccaaccaagccatcggcgatgcttacaccatagccaatcaatgcgacaaagcattggattcgtatcaggatgctttaaaggaattaaaccatctctcgcagcaacatccctaccggatacaactcttattaaagatatccaatgctttacaacgtaaaggacaactggaaaaggctcaaaaaacattgcatgacatagaacaaactcttcagaaacaaccggactatgccaccagtttttttgccaatatcgaaaaagccaactatgcaatctctcacggacatctttcaaaggcttatctcaaggaagccgcagcatatctgcacaacatggattccatctaccggatacatcctgaaaagttttactgttttcacctgaaatatactaccgccgcctactatcgggcaatgggcaactggaacagaatgtattggaacaaagccctgcagctgtatgaagagctacgacaagaatacacggtcaacaaacagtctgcctattaccgatggatcacgcaagaaacaatatacctatataagatacaagggaaatcaatggccgcctgcctgttgtatcaagaattatattccactgttgacacactcactgcagaaggttatgtccgacaaatcaatattctacgggccaagtatcagatagaccaaatggaaatagccagtagagaagagcacaacaaattcatcactggcatattgaccgggagtatcctattagtcttcatatttattattataaccatcatgcttagaaaacagcgacaggaaatcgccctgtctacacaaaagctggaacacctgcgcaccaatgccgaaaatgccacatccgccaaaagcatattcctctcgaacatgagccatgaaatacgtactccgctcaatgcactctccggcttctcctcactactgaccgaagaaaacctggataatgagacgcgtcgtcagtgcaatgaagtaatcctgcaaaattccgagttattgttgaaactcatcaatgatgtgatagatctatcaagccttgaattcgggaaaatacaattctgtatcaacaaatataacgttgtcaatatttgccgaaatgtaatcgataccgtcagcaaaataaaacagactcaggcagccatatgcttcataaccgaattagagagcatggatatagagacagacgatgcacgtttgcagcaagtgctgataaacctactgattaatgcaaccaaatttacatcgcagggtagcattatcctggagcttaggaagcaatcggaacaagagctgctcttttctgtcacagatacaggttgcggtatccctaaagagaagcaagccgcaatcttccgaagattcgagaaactaaatgaaaatgcacaaggaagcgggctgggactttccatctgtcagcttatcattgaacatatcggcggaaaaatatggattgactccgactatacaggcggctcacgcttcttcttcacccaccccatccggcaatcacagtccactaacccccaaaaggagaataacgcatgaaaagatcatttatcataccaaccttactcatcctactcctgtccgtacaaattatcaatgccgatgtacaaagccagaattccgtgctccaccagcattctattgaaatagagagatgcataaacaacggcatccgaaaagccgattctttggtaaaaaccggaaaaccagatgaagcacttacatattataagagcagccttaagtcaaaagactcattatataatcttattaccaactcccagatggaagaaatcctttcactctacaacatggataagctcatactgcaaagagaacaaagacacagtatgtttcatcaaacctgtttatacatctcagtcatcattatcttagctctactactttccaatatccatatataccgaagccggaaacggctgcaaaagaatgaaaaagaaatcagaagattaacctccattgccgaagaagccaatgaaataaaaagccactttctgacaaatatgagttacaacatccgtatactcttaaataatgtagtaggattctcgcaacttatgaccgaagacgggaacctgaacgaaaaggaaaaacgagaatactccggcatcattcaaagcaactcggctgaattaatccaacttgtgaataacgtattagacctttcacgtctggaagccaacatgatgaagtttcagctacagaactgcaatgtgcaagagtggtgcaacgaactcccctatctggtgcagatgcgaagtgaaggatatatacatctggagcttcaagccgatgtgaacaatgcaatcatatacacggatgtcagccgcttcacacaaataatttccagcatgctactctatcctgtagagtgcaaaaagccaagaagaataggtatgcaactggtttacaatcggaaaaaacaggaaataaactcccgaatagacaacagtccacttgctgattcggcatttgcctcacaaaaagaagctatattacaaaaaatcaatctattgttttttgaacatttcaacggaagttatcgtgtagagaactgtgaaaataatccgattatatttttcacatatccagcgcttataacctgattatatgtacattcacctcaaccgttatttagacaagatacaaattaaatgtttttaatcaagattgatagcaagtattgaagaaaacaactatttttgccaaatcaattagtactaataattaaaaaattaaagaaaatggcttacgtaattagtgacgattgtattgcttgcggaacttgtatcgacgagtgtccggtaggcgctatctctgaaggcgatatctactctatcgatcctgaaacttgtactgaatgcggtacttgtgcagatgtttgcccttctgaagcaattcatccgggagaataatacaatcctaagaaaaagaaaaaaggctcggtttcaatgaaatcgggcctttttatttcagtactaaaaagactcagtgccaagaagaaaaatatacatctttatctatactggccaaacccgctttttgcgtgaaatatctaaatatacaaagaagccaaccaatccacaatacatttcaaacgtgaattagttggctttttatattgcagagttacaccccatacacctgagatgaacttctgtcatcaaaagattataccagctttgacaatgcttccttgatacggctaatagcttccacaatattctcatcgctggtagcataactcatgcgaatacattcgggagcaccaaacgatgtgccgcctacacaagctacatgagctacttccaacaagtacatagccaaatcatccgaattctcaatcttacggtcaccggcagacttaccgaagaatgagctacatttcgggaacaagtagaaagcaccttccggtacatttacttcgaatcccggtacttccttagccagtttcacaataaggtcgcgacggcgttcaaaagccttacgcatctcttccaccggagcctgcgttcccgtataagcagcttcagcggctttctgagatacagaacacggccctgatgtgtactgcccctgcaatttgttagaagcctttacaatccattccggtcctgcaatgaaaccaatacgccagcctgtcatggcataagccttggaaacaccgtttacaatcactgtacgatccttcatttcagggaactgtgcaatgctctggtgcttaccaatataattgatatgttcataaatttcatcagctatgacaattacctgcggatgctttgccaacacggcaaccaatccggccaattcctccttgctatatacagaccccgtaggattggaaggagaacagagaattagtgcttttgtttttggcgtaatagcagcctccaattgagccggtgtaatcttgaagtcctgctcgatgcccgctgtgacaatcaccggcttaccttctgccagctttaccatttcaggatagctgacccaatacggcgcaggcacaatcacttcatcacctggattcaccaataccagaatggcattgcaaaccgactgtttagctccgttagcacaagaaatttgcgcaactgtatagtccagaccattctccttcttcaatttttctacgatagcattacgtagagctggataacccggaacgggagaatagcgagagaagttatcgtctatcgccttttttgcagcctctttaatgtggtcgggtgtattaaaatcaggttctccgacacttaaattaattacgtctacaccttgagctttcaactctgcacttttttgagacatagccagcgtcgcagagggcgacaagctattcaaacggtctgataattggttcattctatttctatttaatggttgttatgcaaatccggttgcaaaataaacgattttctttgatataataaaacaaaaagacagttacttactaaaatggagagtgtgtcccatacgctctttcttcgtacgcaagtaacgctcgttatactggttcggagtagtttcaaccggtacattctctacaatctccagaccataagcttccaaaccgacacgtttcaccggattgtttgtaagcagacgcatcttatgcacccccaattcacgcagtatctgagcccccacaccataatcgcgttcatctgccagatgcccgagacaaatgttggcatctactgtatccataccgtcttcctgaagtttatacgctctcatcttttccatcagaccaatgccccgaccctcctggttgagatatacgataactcctttaccggctttttctatcacctccatcgccttgtgcaactgctcgccgcaatcacaacgcatggaaccgaatatatcccccgtagcacaggaagaatgtacacgcaccaacaccggttcatcgggagcccaagtacccttaaacaaggccacatgctccaatccgttggacttctgacggaaaggaatcaagcggaaatgtccatgctctgtcggcatatccacctctacacctttttctacgatagattcctgttgcaaacggtaagctatcatatcgcggatagaaatcagtttcaaattaaattcatctgccattttacgcaattcgggcaaacgtgccatcgtaccgtcttcgttcatgatctccataagcgcgccggcaggatagaaacccgacaaacgacacatatcaatcgtagcttcggtatgaccagcacgacgtaatacccctttctcctgcgcatacaaaggattgatatgtccggggcgaccgaaagtagccggagtggaaagcggatcggccagtgcctgaatggttgcagcacggtctgctgcagaaacaccggttgtacaaccttctaatttatcgacagtcaccgtaaaaggagtacccaataccgaggtattgtccgtcacctgatgaggtaaatccagctctttgcaacgagacaccgtaatcggagcacacaatactccacgtgcatgcttcagcataaaattcactttttccgatgttatcttttctgctgcaataatcaagtcgccttcattttcacgatcttcatcatcgactacaatcacgaaattgccagccttaaaatcttcaatggcctcctctatcgtatttaactttactttttccatatctttattatttattctgattgacttttataatattctgtatctcttcgtttgtgtggataatccgctccatgtccttattcaagcggatacggaatgcccaaatacggaagtaaaagaacaagccgacaggcactatcgctccacacagcatattcaaccaataattacggaaaggacgcacatgggcatgaacagctattaccgggtaattattcaatgctgtcaacaacggtatagaccttgtgttagacatctcgtctatcaaagtttccaaccgttcattgagagccaccacctcctcatcgtgtggcgcatcgttcatccataatctgaaataattgggtgctcgcatcagagttttcttttcggcatacgcacggcaatccgccgacagccgctgaagttctcccggcaaacgtacataatcaggatcgtgaataatcacttctttccggaacaaatggcggacactgcgaatacctgctatctttttaaaccaattgatataggcatcagcattcagcaccaccgaatcattattggatttataagtaaggaatgcacccaatggcgccagcacagctgtactggtccacatacccatccacacaatccacttaccgtcacgagccatcttataacccgtattgttgataatgtaatagatgataaaaataagcacggacactactacaggcatgcctaaaccgcctttacggatgataccacccaacggtgcaccgatgaagaaaaaaataaggcatgccaacgaaagcgtcagtttctcgtgccaggaagtcatatggcgcctcaaactgttttccgtctgcgatatattgaaacccttgaaactccaatcacttgcagcactctccgcacggctgacagccgtagacattatcttctgtttctgcattaaagtagccacattaaacagactgtccacatcgtagctacccaaagttgcagattctatttttatcgtatcagccttactcagcgtattggaggtcgccttataagtactcgccatagcctctttataataagtacgcccgatgctatcgttctgcaccttcatagaatcaatgccggcctgcaacattttcatgtccttgctattggattggttgctcataaatccggcatccaccatattgaaatccgagttgaactctataatcgcatgcttctcaacgaacgcttcccgacgataaggcacatttttctgattcatactctgcgacttcagattttcaaactgctcaccgctgtaaaggtgaagataaagatgctgtttgtccgctgtcatttccaatctgccggaatccgatttgataatctgcgcattctcaaaccctttctcgaaattataaatcaatacatcatacagcatacctgtcttacggtttttatgctttacgtaaaggttatacccgtctatctcatcataaaatactccttcgggaatgtccacttcgggcgacttctgcttcatggataccagcaatgtccataacttagtctgcgctttagggccaataacattctgaaaataaaaggaaacgcagcaaataatggatatgaaaattatcagcggacgcataatcttaagcaaagaaatacctgccgctttcatggcaagcaattcaaaccgctctccaaaattgccaaaagtgataagagctgccagcaaaatagccaaaggcaatgaagccggcaccagcgtcagcgccgaatagaaaaaaaattgggcaagaacattcatctccaatccttttcccaccatttcgtctacatatttccacagaaactgcatcatgaagatgaaaaggcagataaagaaagtgcccataaagagcatgcaaaagctctttaaaataaatatatctaacttttttatgcgcagcattttacttgtttcatgcaataaacgcacaaaagtagcacaaaaaagggagtacgggaaatttttaattgaaagttaactaaaaaccgcatgttctacgcaaggtatctacctgagattcccacaattcacgcaaatcatttgcttcgtctgcattggtgaaatctgttatttcaagtacaaaatcattggttaactcattgtttgtcatctttaattcaaaatactcacgcggtttttcattatccaaccaacgaaagcggataaaagagtatgcacgcactgcaatgatttcagcatcacgtctctctgtctttccccaaaagaaagacactatcttatcatccgattgcaccctgtctgcaaaccaaccctccaaacctgtaggagtacttattgctgtccaaagaatacttttagaagtcgcattcaagagatattccaaatgtattttttccctttccatagtctattctgcttttattgcgccagccaagataaatacttttttctaattagaaaaaataattcattgattttattctcatttgctttctattcaaagttaaaacgttgataatgttatacaatagatacaaaacaataagagtaaaaagtttttttatctcaaatcataaaatatgcgacaaaaaaatacgcctgaaaattttggcagtttaaagaaaagctatatctttgcacccgcaatcaagaaacaatggcgggatagctcagctggttagagcgcatgattcataatcatgaggtccccggttcaatcccgggtcccgctacaaagaagatttagactgttaggaggcttccactcttggcggtctttttttgttttttgcctcaattggtagcaagtgacgctattggttgccctcctttcaaaaaaattgatcatattggggcagtccgaaaaaacacccggcaacaaaagtggaaagcaaaggatttttgcactatggcaagcaagttatctttccagacagatattaacagcattcatcccctttgctcctcgttcgaggtcgaatgtaacgatattaccctctctgacatccgcaacaacattgttcacgtgaaagaaatatttttcaattcctgcaaggtctttgataaatccaaatcctctggcttcattaaagaactctattcttcctctcaaaattaccggttcttcatcttctttcctgggagtggaaatcattatctcctctacattaatctcttgctttttgatattctcttcgggtggagttgaagtaatcataccatattcgtccacataagcaatcatatcatcaaaactgctttttgtagattttctaccttctcttctttttaattttgcttcccgcttagcaagtcttttcttttcattctcacgctttcctactgtcatggattttgccatagattttatagtttaatgggtgtatactcgtcggataaataaaataataaacttagaaacgacctcagatagcaaactcaaccttgctgagtttcttacctgtcagcttctgaatatcgttaaccaacttacgctcttcctgcgagcaaaaagtcaatgccgttcctaaattaccagctctaccggtacgtccaatacgatgcacatacgtctcgggcacatcgggaaggtcatagtttataaccaacggcaactcattgatatcaatgcctctggctgcaatatcggtagctatcattacacgtatcttacccgttttgaagttttccaatgcagattgccttgcattctgacttttatttccatgaatagcctgactaccgatacctgctttgcttaatacgcggacaattctgtccgcattatgcttggtacgtgagaaaacaagcaccgactgtccctccgttttatgcaaaatagaaatcaacaatttacttttctctttcttctccacaaaataaatagtctgttcgatagtatctaccgtagatgattttggggttatagtaatcttcaccggttgtttcagcagtgagttcgtcaaagcgattatcgtatcgggcatggtagccgagaagaacaaggtctgcttttctttaggaagtttcggcaacaaacgtttgatgtcatggataaatcccatatcaagcatacggtcagcctcatccagtacgaagtgtcgcacattatccaaatggatatatccctgattcatcaaatccaacagacgtcctggagtggcgaccaatatgtcgactcctttatggagcatatttacctgcgcacgctggtttactcctccgaagataaccccatgacggacttgcgtatatttggcatagtcgtctatgcattcgctaatctgcaatgccaattcacgggtaggtgtcagtatcaaggctttgatactcttatcccggtttttaaggacttgcaaatgctgaataatgggaatggcaaatgcagcggtctttccagttccggtctgcgcacagcctaatatgtcttttcctgttaaggcggcagggattgcttttacttgtataggggtaggattggcataccctttttcttcaattgcttttaaaataggttcggttatatttaaatctttaaatgtcatatatattgtttttgaatgtgctaaaacactagcacaagtataatgagagcacgcttcactcaagtggcccatacaaaaagtctgataagtctttgcagaatgaaaagtgcaggtaatgaagcggaacgcttccgctaaataaaaaaacggagtttatttatgaaaggcaggaaagcaagtttcccgcctttagtctgatattaatatcttctggagttattataaccaccacgagagctaccattcgagggtctttcctcgcgaggacgcgcaacgcttacagaaataaccttgctgtcatattctacgccgttcaattcgtcaatagctttctgtccttctgtatcattgttcatctctacaaaagcgaatcctctggatctaccggtttctctatcgagaattactttagctgaagaaacttctccaaactctgcaaataaatttgtcaagtcagcattattaatgccataacttaaacctgaaatgtaaatgttcattctaaaaatgttataaaataaataataaatggagtgaggaggataattaaagaagaggactgcttactaataatatattaaaaagaagaactatacgataatgattcgtaactcaaactctgggacaaaggtagtataataaatttgataaatacatttcttcctgttttttttcacaagaaagacgattattatcatttattaagcaggtacggaaattcaaaacagttgttttttacctatttatatccatagtaagaaggataaaaaggaaaatatgaacacaagcagtctatatatggataacattttcccaaaattagcaactaactttgcacaaattattggtgattattatgaaaaaactactattcattttttcctttctctgtttgtcggctgtcgaaggatacgcccaaaagactttgacgctgaaagattgccttgaaataggtatcgaaaacaacctgtccttggaaagcaaacgcaaggaaatgcagaaaagcaaatatggagtttctgaaaaccgggcaagactattgccccaaatcaacgggtttgccaattacaatgacaacatagacccacccgtatccgttaccgacggttcggcctacggaaatccgtataacattacctataccctacggaacagtgccaatgccggcctgcagttgcaaatgccactttacaaccaaaccctgtacaccactgtttccatagccaaaactatggacgagataagccgtctttcttatgagaaagcacgggaagaccttatcctggaaatatgcaagatgtattatctggggcaaaccacagccgagcaagtcacactgataaaggccaatatcacccggttggaagaattaaaaaacatcacagtagctttccatgacaatggtatggccatggaagtggatgtaaaacgggtcaatatcaatctggaaaatctgaaagtacaatacgacaatgtactggccatgcaggaacaacaactgaacctgctgaaatatatcatggattatcctgccgaagaacagataaccttagttccggtaaactccgagaacattacgcctgttgagttgaccggactatccgaaaatctgtacgaactccaactgctgcaatcgcaaagggtcatggctgaaaagcagaaaaagatgattggtcacggttatattccttcattaaacctgaccgccaactggatgttctccgcctatacggacaaggcctaccgttggttccattccggaccgtccaaccattggttccgttcctacggactgggcgtatccttacgcgttcctatattcgacggactggataagcgttacaaaaaccgaaaagctgcaatagacatcgaaaatataaagctggcacaggaaaatacccgcaaaaatctgcagacccaatatctgaacgccaccaacgacctgatgaacaaccaacgtaacttcaaaaagcagaaagataactacctgcttgccgaagatgtatatacggtcacaatggatcggtacagagagggtatcgcttccatgaccgaagtcctgcaagacgaaatgcagatgagcgaagcgcaaaacaactatatcagcgcacattacaactatcgggtaacaaccctgctgctgttgaagctgacaggacaaatagatacattaattaaataacaagttaatcaaatcatcataatatggaagcaatagaaaaaaataacgcatcgaacacacatcaggagaaagctaaaaaacttcgtaagctacgtcgctggcaaatcgcagtcagcttgttgggagcagcaatcgttgtttggggaatagtggaagttgcttgtctcttcctcggctacaatcgcacagaaaccagtaatgacgcacagatagagcagtacatatcccctatcaacctacgcgcatcaggctatatcaagaagatttattttaccgaacatcaagaggtacataaaggcgatacgctccttgtattggacgaccgcgaatataagatacgcgtaatggaagccgaagccgcactgaaagacgcactggccggcgctaccgtaatcggggccacattgcaaaccacacagaccaccgcttccgtgtacgacgcttccatctctgaaattgaaatccgtcttgccaaactggagaaagaccgccaacgctaccagaacctggtgcaaagaaatgcagccactcccatacagttggaacagatagaaacggaatacgaagccacccgcaagaagctggaagcaacaaaacgccagcaaaaagccgctttgtcgggagtcaatgaagtatcacaccgccgtgaaagtacagaagccgccatccaacgggcaaccgctgctttggaaatggcacgtctgaatctttcctacaccgtagtagtagctccctgcgatggcaaattgggacgccgggcactggaagaaggccagttcatcacagccggacaaaccattacttatatcctgcccgatactcaaaaatggattgtcgccaactataaggaaactcaagtggaaaacctgcatataggacaagaggttaccatcactgtagatgctatcagcgacaaagagttcacgggaacaatcacagccatatccggcgctacgggttccaagtactcattggttcctaccgacaattcagccggaaacttcgtcaaaatacaacaacgcatacccgtacgcatcgacttcaccaatctttccaaagaagataacgaaaaacttgctgccggtatgatggtaatagtgaaagccgaactctgattttcaatcattaattgttaaggaaatgcccgcatatcccaaaaactatcctttctataactgggtgcctaaaccgataggcattatcatcctgttcatgttcttcctgcccattcttacagtaggcggaacttactctgccagcggcacggagatgatgagcggtctgggcatcatatccgaacatatccagtttgccaacttcgccacatccataggcatggcggcattctgccctttcctgtaccggctggtatgtatccgcagggagaaaatgatgtgtatcgtcggattttcgctgatgtatatcttcagctacatctgcgccaagacagacagcatattcctgttggcgctatgcagtctgtttatgggattcctgcgtatggtgctgatgatggtcaatctgtttactctcatcaagtatgccggtaacgtagaagcaaccgaaaagatcacccccggcaatgaacccaccaccggtgaaggctgggacaaactggatattgaacgaagcgctgcacaacccgccatttacctgttttttatggtattggggcagttgggcacatcgcttacagcatggcttacttacgaatacgagtggcaatatgtttattacttcatgatggggttgctgttgctctgtatcctcattaccttcgtcacgatgccttatcataagtatgccacccgccgttttcctatcaacctcaaacaatttggcaacgcttccatcttctgtatcacactgacgtgcatcacttatgtgctgacttacggcaaggtgctcgactggtatgacgaccctacaatccaatgggcaacggtcggtgctgtggttgcaggtattctgtttgtctacatagaagtaacccagcgcaatccctactatcagttcgacgtactcaagttgcgaactatccgcttcggattcctgttctactttctgttaatggtactgaactccagttcaatgttcgtcaatgtatttacgggaataggcatgaagctggacaactatcaaaacgcgacattgggcaactggtctatgttaggttattttatcggtggcattgcaacgatctggctcagcgtgaaaggagtgcactttaaatatctttttgccgcaggtttcctgtttttgggattatccgccatgttcatgtactttgaggtacagggcgcaggcttgtacgaacgaatgaaatatccagttattatccgttctacaggcatgatgttcctatactcgctgataccgacttttgcaacccagcgtatgccttataaatacctctcatcgtggatttgcacaatgcttactgtacgtatggtacttgctcccagcataggaaccgcattatacagcaatgtattgcaggaacggcagcaacactacattacccgttatgcacagaatgtggatatgatgcaccccgaggcatccgcctcatttatgcaaaccgtacaaggaatgcaatatcaggggaaaagcaagcaggaagccgttaacatggcagccacatccaccaaagggcgcattcaggtgcaggccaccttatcggcagtcaaggagatggcgggttggacattgtatgcttgccttttttgcatgatatttgttgtggtactgccctatcctaaacggaaattattaacttagcactgttttcaaacaagaaccgtaaaccctactctcatggatacccgacaagaacgtttatcgcgccttgacagtgcgttattggacaaacggcaaatttgcagttcggaaggcgtgctttgcgccttcccgtctgccttgaaaagtccgtttatgatagacggagtgggacttataatttgccgtcaaggaagtttcaccttcatccttaaccagaaaacattttccgccaaagccggtgatacgctctttctgccgaaggactccttgtttcaggtactacaggcatccgacaacgtagaggtatatatcttcatctatcagaccgaccccatacgggactttatgggaaactcggtagtatccatgcacctatactcgcatttggccaccgaaccgtgctacgtatggaataccggagaagaagaagaggttttaaaatacctgtcactattggacagtacgctgaaaatagaagagaatccttttaaccggtatgaacagaagttgcttctgttggcactaacccacaggctttgctcggtttatacacgcaaactcattgccgaaaagacttccgtaagccacaagcacgatatatttatccgtctggtgcaattaatagaacaatattatacaaaagagcggggggtggacttctacgcggacaagctatgcctgtcgcccaaatacctctccgccctctccaaatccatttgcggatacacggtacaggagctggtattcaagtccattatccgcaaaagcatttcactactcaagaatacacaaaagaacgtacaggaaatctccgatttcttcaacttcccgaacgcatcctatttcggcactttcttcaagaaacagattggaatgtcgccacagcaataccgcagaatgtagggaaacatcatatcgctattacgctttcagtcgaataacgaaacggctgccttttcccaattcactctgaacggtcagcgtgccgccatgagcttctacaaaatctttggatatggatagtcccaatccgcttccctgcactttcgtaccgggtacacggaagtaacggtcgaagatgctctggtgatagcgcggatcaatacctttaccaaaatcctgtacataaagttccacactattatcttcctgccttgcgccgataatgacatgcccgttttccttggaataacgaatggcgttactcaacaagttagtgagcacccatgctatcttctcgctatccacaaacaatttcggcatcttctcttccggatattccacctcaatctgtatattgaacttatcggcctgcacctgatttgccttgatggcatattctatcagttcgataggtttcgttatcttcggtatcatctgtaacttgccggcttccacctgcgtcatattaagaagctcgcctgtaatccccagcaagcggtcggcattttccctgatacttttcgaaagttgttcctgttcctcgttcaaagcgcccacacggttgtcctctaaaagctgcagactcataagaatggcggagataggggttttcaattcatgcgaaatcgtagaaataaaagttgtttttgccgtatccagttctttaaattcggtgatattcttcaacagaataacatcgcccagattatgagactcgtccgtatcggcatccgtattcataatagtaatataagatgcctgaaaatagctttccttattatccgcataaattttcaaaggctctttcttctcgcccggattaaccaactcccttatcagcctccggagcagatcgtttttcagcgacagttcctctgccgaacggcgtatgacatcctcacgcttcagattcagtacggtcagcgcttctttattgacgaaaagaatttcgtgttcgcggtttaagccgataataggttcatgaatactgtttacgatggcttccagaaactttttggcggataaaatatcattcagcgtactggtacgatattccgtaaggcgttccgccatgctgttaaaactatcggccacctcgcggaactcttcgtgttcgctcatgtcaaggcgcttttcataattatggttggctatttcgaggatgccctgcgtcagctccctgataggtttattaatggagcggggcaaccataccaacaacacgatactggcaagaatgcaaataccgcccgtaatggaaatccaaagcaaggcccgttgcaagccgggcatggcggcagggctatccggctccgtagccgtcagtatctggagatttacaacagaaagggctaccagcaggattatcatacctgccagaacacctacgctgagtatcagttttgtacgaatattcataacggtcaagatattaaattttatgcaagtataatcaaatctatgtttgcttgcgccagttcgttcacaaattttctatatttcagaaccataaacaaggattgcggcaaagcgaacgaaggactgcccatacaaacggtcgttatctgcttctctttacaagccgtaacgatgctgtccaacacgtctttggattgcacctgcatgacctctccgcccaattcggtcaccagcttgaaatgattcagcagatgccgctggttcgcaagggcaatgcggtcggcactctcccggggagtctgtacataaagggcaacgaacgacgtattataacgggttgccaatcgtgccgccttgcggataatgcggcgtggcgttttctcatgactgctgatacacgccatgaacttctcatgccgcacgcccacacaggaaaccaccacttcattctccactttcttctccactcttaatgccacctccttcagagccagttcgcgcagttgcagaatattttccgtcttgaagaaattattcaaagcaagggccactttatccggcttgtatattttaccggctttcaggcgggttatcagctcttccgccgtcaggtcgatattcaccacttcatccgcttcttccagcacactgtcgggaatgcgttcctttacctcgataccggaaatgccttgcacttcttcattaatgctctcgatatgctgtatgttgacagcggatataacattgataccctcatccagcaagtccattacatcctgccaacgcttctcattcctactgccttctacattggtgtgcgccagctcgtccacaataacgatttccggatggatacggatgatagcgtcaaggtccatttcctcgagttccttacccttatagaatatcttacgccggggaattacgggcagtcccgccaacaccgcctccgtaccggcacgtccatgcgtttccacatagcctatattcacgtctaccccattgtccagcaagtcatgggcttcctgaagcatacgataagttttgcctacaccggcaatcatgccgatgtagaccttaaacttaccacgacgtgatttcttaatcaagtcgaggaaatgttgtacactctcctccctgctcatggcttcagagttataccaaacaccagatgcgcatcttccatacggggattccaaatagcctgcgcaaatatcggtatcgcgaatttgtccgtcacctttatatccttcgtggctttcagtgccagattggttactgcgaatccgctgttcggtactccgtaaacacctacgccggcttcgtaaggcagaaaaccgcaagtggcattcaaatcgacggatttaatgctgaacggatagttcaattctacataagaagaataattctgctctcccttctcattcttatccgcgccggcaaacatcgtgtaccaggctattgacagcggaaacttctccaacggaagtgtataggcaagccccgcttcaaaatggtgggccgtttcatggcttttgaagttaaaatacttattgcttccctgacctgcccaccaaagactggcaacggacaaggtcaaaccggaatcaccgaacgtataagctgccgtcaaatctatttctttggcagcctcaccctccgaggaacttgttccgtcgaaatcggtagagccccatgccatcaacgcaaagccgcctatcccaaagcctaaagtcggctggaaactaactccggtttgataaaagccgcgccatacataggaactgaccaaatcaccctgtatcttaaattcctgcgcctgcactttatccactcccataaaatttactgccaaagcggcaataacgcctattaccgttacttttacccgattcatatctttcattattttcttattttccatttgctttttccaatgcaatattcagcttcaacacattcactttcgccgtaccgaacaatcccagcaacggtttttcaacagccttgtcaacgatgccccggacagtagcctcatccattccccttgcctcagccacacgctttacctgtacataagcactggcaggcgtaatatcgggatcaagccccgaagcgctggccgttaccatttcggcaggaacttctttacgctgcaaataaggatgatgcagcaagaatgtatctatacgcgcttccacttccgcaaggtattcttcatttgcagggcctttattgctacctgccgagctgcttgcatcataaccgtcaccggcacaggaaggccgtccccaaaaataaatgtcttccgtaaacatctgccccacgttggcagcgcccactgccttgccgttcagggtcaatacctcggcatttcctttattcggccctgcaaattgtgcgaatatccacaatacaaggatatagaacacggaaaagaatatgcagaaagcgacggttattctaactgatttccaaagagttttcattttctttttattttaaattaaaaaaacaaacagacaaacatatctattaacttaatacctatgaacggcgctatgacaccacccaaaccataaatcagcaagttgcggcgcagtaacgcgcttgcgccgatcggtttgtaccggacgcctctcaaagccaacggtatcagtatgggaatgatgacagcattaaagatgatagccgaaagaatggccgtttcagggctatgcaaccccatgatattcaatggggccaattgagggatagcaaccatgaacagtgcgggaataatagcaaagtatttggccacatcattcgcaatggagaaagtcgtaagcgtaccgcgcgtcatcagcaactgcttgcctatctctactatttcaatcagcttggtcgggtcattgtcaaggtctaccatattgccggcttcctttgcagcctgcgtaccgctattcatggcaacccccacatttgcctgcgccagtgcgggggcatcattggttccgtctcccatcatggcaaccagtttgccggcctgctgctctttcttgatatactccattttatcctccggctttgcttcggcaatgaaatcatccacaccggctttttcggcaatatatttggcggtcaacgggttgtcaccggtcaccataaccgtcttcacccccattttacgaagacgttcaaagcgttcctggatgcccggcttgataatgtcctgcaattctatgactcccaataccgctttattgacacacactaccagcggggtaccgccattgcccgaaatgacggcaatcgcttcttccacttctttcgggaatttattccccgcgctttccacaatccgacgaatcgcatcgaacgcacctttgcggatttgagtaccgtcttgcaggtcgacaccggaacatttggtttcggccgtaaacttaatcatgtgggctcccgcagtattgaggtcgcgcatacgatgtccgttctcacgtcccagctcgatgatggatttcccttccggggtttcatcggagagcgaggacagcaggcaggcctctacaaacaccttttcatcaatgcccggagccggatgaaacttggtagccttacgattaccgatagtaattgtaccggtcttgtccaacagcaacgtatcaatgtcaccggcagtttcaacggctttgcccgattttgtgattacattggcacgcagggcgcggtccataccggcaataccgattgccgaaagcaagccgccgatggttgtcggtatcaggcagacaaacaatgagagaatagccgcaatagagatatacgtacccggatggtcgatagcggtatagtccgccatcggaatcaacgtaatacatacgattacgaacactaacgtaaaaccggccaataagatagtcagcgctatttcgttcggtgttttcttccgggtagcaccctctaccagcgcaatcatcttgtcgaggaaactctctcccggttgctgcgtaaccaacacctttatcttatccgacagcactttcgtaccgccggtaacggagcttttatcaccgcccgcctcacggattaccggagcggattcaccggtaatggcactctcgtcaatagaagccaacccttccacaatctcgccatcggcaggaatcgtatcgccggcttcgcaaacaaagaagtctcccttcttgagacgtgcgctgcttacagtgcgtaacttgccttccaccaaaacctttgcgggcgtttcttcacgcgttttacgcaggctgtccgcctgtgccttgccacgggcttcggcaatggcctcggcaaagttggcaaacaacaaagtgacaaacaatatcacaaacaccaggaagttataaccgaacgtcccgtattccgatgttcccaaagagaggatgcagactaccagcatcaccaatgtcaccagctccacagtgaacatgatcggattctttatcatcacccgcggattcaacttcacgaatgactgtttcaaactttccattacttgctccttttgaaacaaagaagctgattttttatccttcataaacatatctgattattcttatctcgttacaaactgaagtgttcggcaatagtactcaacgcatgtgccgggaagaaagacaaagctgccacgataaagattacagcaaaagtcattacggcaaaggtgaacgtatcggttttcagcgtaccggcactttcgggaataaatctcttctgcgccaacagacctgcaatggcaacctgccctacaataggaagaaaacggctcagaataagtacccaaccgcaggcatagttccagaaataagtattgtcgcccaagccttcgaaaccagagccgttgttggcagcgcacgaagtaaattcatagaattgctcgctcagcccgtgaaaaccgggattgttcagccagccgccctcactctctacaaactccggatggtgcgcaaggagataacaagacagagccgtgcctaccaatatcacaaacggatgaagcagcgcaacgattgtcgctattttcatctcccgggcttccactttctttccgagaaactccggtgtacgtcccaccatcagtccgctgataaagactgcgataatgataaatgtataatagttcatccaccctacaccgacaccgccgaaccaagtgtttatctgcatgttcagcatctccatcataccggacagtggcatcgtagaatcgtgcatgccattgacggaaccgttggaagtaaccgtagtcgtaatgctccataatgcggtggcacctgctcccagacggacttccttgccttccatagccccattgtcctgtgcaatgcccatatcgtcaatgcgaggattaccgttcatctcctgataaacattgatgccgacacccgccaaataggcacagagcattacgccgtaaatactataagccagtttcatccgttttgtataaaaacccaacgcaaaaaccatagccataggtataatcaggatagaccaacattctacgatattggacaggtaagtaggattttccaacggatgagacgaatttacgccgaagtaaccaccgccgttcgtacccaactgcttgataggaacgatggcagccaccggcccttgtgacaccgtttgttcctgtccttcaagcgtagtcacctccatcttaccgtcaaaacccatcggagtaccttgtgtaataaggataaagccgacaatcagggaaagcggcaaaagaatacgcgtgcaactcaatacaagaaagttccagaagttaccgattgtattcgttgttttacggctgatggacttcataatgcccgccatagccgccatacctgtcgctgcggtaataaactggaagagcatgatgacgaacaactgggtaaaatacgtcagtccgctctcaccggaataatgctgcaagttacagtttaccataaaactgatgcaggtattgaatgcctggtcgggagtttgcgggccattaccgtcaggattcagcggcagccatccttgactgaccaacagcaccattccccagacaaaccagaaagcattcaatatcagcaacgccttgaggaactgcttccagttcatttcttcattgggattaacgcccgctaccttaaatatcagtctctctagcggtttcataaagtccgaccatgtcttctctcctttataaaccttcgcaatatattttcccagcggataagaaatcgccaccaacaggaaaatctgtaaaactacacctaaaatttccgtattcatttctttaatcttttagaacctttcgggtttcaccagaacatacattaagtacccgaacactgcaacacctaatacaaataatactgtgtacataatcttttctctcctctttaaatcttctcaaaccaatccacacatttccagaatagccagaaagcgagaaatccgctcaacaggcagaaaataaatgaaatcgttattcccatgtttttacgttgttaaattaatattcatgttttaccgtcctcataattgccaaatgcgtgccaaaataggagtctgaaagataaaatactgatttacaaataaataaaacacaataaaggagttacagaaaaagaaaacaccctttcaaaatgaaagggtgtctatcaaaatagaaaaggtacattgcatgcttcgaggttcatctggcgaaaccatttatttccttaggagaaaccggaagttccacggggtgaaacaaagagtaccccggcatggtacactttgtttcccgacatggaacacttcgttccacgccgggaaactttcggcaagttacggaaaagaacagattatattccgtattcttcgattttgcggtagagtgtggtcaatccgattttgagcaggcgggctgcttcggtcttattaccttttgtatattccaacacacgggcgatgtggcgacgctccatggcagaaagttcaaaactgccgggagtggtttcatcggattgttcgtaatgtgtgttctgtatatcgagcggcaagtcggcaacatccagccgttcactctcgcaaacaatcagactgcgctctatcacattacgcaattcccgaatattacctttccaaggttgttgttcgagggcttcgagaaaagcgggtgttatttccgtaacgggacgtgccaaccgaacggagaagtcctttacaaaggcttttgccagaatacgtacatcgcccgcccgttcacgcaagggcggcagatgaatttggaatacggagagtctgtagaataaatcttcgcgaaaacgtcctgcggtaatctcttccggcagattgcggttggttgcggcaacaacacgcacattcacacgggtgggtttggtatcgccaatctttatatattcgcctgtttcgagaatgcgcagcagtttggcttgcagttcaaatgccatttcaccgatttcatccaagaagatagtgccattgtcggcctcctcaaacaatcctttcttatctttcaatgctcctgtaaacgaaccggctttatgaccgaacatctcgctttccaacagttccttactgaaagaggagcagtttaccgctacgaaattctgcttagcacgcttactattataatgtatggcttgcgcaaagacctcctttcccgtacccgtttcacccgtcagtaatacgggaacatccgttcccgatactttctgtgccagtgaaacggcatctttcaatgctttcgaatcacccaaaacagaatcgaaagaatacgtatgccccactttcttttccagtttctccaagcggacgttcatgcgcgccttctctacggcacggctaacaagcggtataatcttattgttatcatcacctttggtgatataatcgaaagcgccgttcttaatggcctgcaccccgtccgggatattaccgtgcgccgtcaacaggattatctctacgttaggggctgttttcttgacagacgacacaaggtctaccccgttaccgtcaggaagaaacacatcgcacaagactacatccgggctctgaaattccaactgcttcaaagcagtcctgcaatcaccggcctggcatacttcatatccttccaactccaacatacgcgacaaaagggtacggatctgtacttcatcgtcaacgactaaaatcttgctcatatttttcggataagtttaaagtaataaatggtaaaaacaggggatgtgcaaatataaacgttttccgggaaacaaacggcatgtcttttgaacttttataagtgaagggagcgcacataagactacggaaaagtaaaaaaacaccttacaatgtatcctcagaggcattgtaagagaactgaaaaagaaactcgcccttccatttcggaaatgagccttctaaaacgaaaaggaatacagaggcttcatccgacagtaaaaaaagaataactaaaaaagatttaaaaatgaaagtttgcaaattcggcggtacttccgtcggcacagtagagagaatgaaacacgtagcggagctcatttcagagtccacaccgaagattgtagtcctgtccgcaacggcaggcactaccaatcatctggaagaaattgcagccagcctgttcaaccgcgacatagaacaggcacacgagaaaatcacccggctggaattccagttcatagactttgccaacgaactgttgacagacgagtccacaaagcgggaagcgatagattatattctcgaccgcttccagcgactctggcaatttatcaatgatgaattcacctcggttgaagaaaaagaggttttggcacaaggggaacttatcagtacagccctgctgcacttctacctgcgggaacggaagattgccaatatcctgctctccgccttcgactttatgcgtaccgggccggaaggagaaccggacttgaaatatatagaggaaaaactacaggtgcaattggcacagtatcccggcatcaacctttttattactcaagggtacatctgcaaaaatgcttataatgaaacggataacctgaaacggggcggcagcgactatacggcatcgctcatcggcgctgccatccgcgcagaggaaatacagatatggacggacattgacgggatgcacaataatgacccgcgtgaagtaacgggaacccgctccgtaaagcatctcagtttcaacgaagccgagcagctggccttttacggagcaaaaatattacacccgttctgcatcgccccggcacgcaagcgcaatatcccggtacgattgctcaactcaatgaatcctcaggcagaggggacattgatttcggatttgcaggacgacaatatcattaaagccatagccgccaaagacaacatcttctacgtgaagttcgagtcgaaacataacttatgtccttatcagtttatcagtaagatttttgatacgtttgccaaatacagaacgccgctttgtctgttggtttcatccaatcaggatgtatccgtcgccatagacaacagcgaacatctatgcaaaatccttgcggagctggaacaatatgcaaaaattctgatggaagaccgcatgtccattgtatccgtggtgggaaacatgcgttggcagtatgccggtgtcgaagcacagattatagaagctctggcagatatcccgctacgtatgatttcgtatggcagcaatgacagtgacgtggcattcgtcattaagacggaagacaagaaaagggctttgcaggcactcagcaatagacttttcgagccggagacggataaaattgtaaagtaaataaaagttcaatctatggagccaataaacagatactttcaaagaatttccgtatttttgctttcattgtttttacaaccttatataatataaagtctaactaaaaccaacagatatgataactcccatctattctcccgcccccggcagatacgaaaacggtatgaaataccgccgttgcggaaagagcggcatccttctacctgaaatatctttagggctatggcacaacttcggcgatgtcaatactttcgccaactcgctatcaatggcacattatgcattcgacaagggtatcacccattttgacctcgccaacaattacggcccttcctgcggctctgcagaagaaacattcggtatgattatgaagaaatcatttatgccctaccgggatgaattattcatttctaccaaagcaggacatgaaatgtggccgggtccttacggtgattggggttcccgaaaatcactgatgagcagcctcaaccaaagtttaaagcggatgaacctcgaatatgtagacatcttctatacccaccgttacgatcccaacaccccgcttgaagagacacttcaaacactcgttgacatcgtacggcaaggtaaagcgctatacatcggcatttccaaataccctaaagacaaagcagaattagcatataaatacttggaagagcgggatgtgcactgcctactccatcaaggtaaatacaatctgtttaaccgcgaaccggaagaagaaggtatcctgaggcaagccaaagaaaacggtacaggattcatcgctttctcccctttggcacaaggattgcttaccaaccgctacctgaacggtattcccgatgattcacgcatcgccaaaggcggcttccttaaaaaagaagcgctgacagatgaagtcttgaaaaagataaaagcactgaatgaactcgccatccgtcgcggtcagacacttgccgaaatggcgcttgcatggatactgaaagacgacttggtgacctcggttattatcggagccagttctgttggacaattggcagataatctgaaagcgattgataataccgctttctctgcagaagaattaaaaaacatttatcagattgtaaaatagtcgccaataccctcgtatgctatgaaagagactatctcaaaatgaaaattgagatagtctttttgatataaccagtcccaaagcggtaacaactatttaaaaccagctaattccaccgccttgaattattattgtgccactttgttggcacaacaatgcctatttattggcacaactatgccacttatatggcacgattatgccaacgaactggcaatgatagtctgaaaagccattcatacccatctgaataaaaagaaaacataccagtttctttatagtccaccgcacatttaacacatctatttttgaaccttttattttttatcttgttctttctccaaaagcctaaggtaccaatagggcaggaatttatatttaacctaaacattatagaagtatgaagaaatttattcccttattattagcggtcttcgcaatagcattcgtatcttgcgaaaaagaccccgacatggataagctggacagcaagtatctggtttataccaattatgacacgaaagcagacttcaaagctttcgaaacttattacttaccggatagcatccttgttatcggcaacagtaaagacgccgaatattggaaagacgaaagtgcacaggaaattctcagcgcatacgttgccaatatgaacaaccgcggttatgtccgtacagacaatcgcgaaaacgccgacctcggtttgcaagtgagttacgtaaagagcacttactactttacggactacggacgccccgaatggtggtggaactacccgggctattgggatgctccttactggggtaactggggcggatggtactatccgtatgccgtaaactatgcttatagtaccggttccttcatcaccgaattgctgaacctcgacgctccccaaggcgaaaaggaaaaacttcccgtactgtggaccagctacatgagcgggttattgagcggctcgacatctttcaacaccaaaatggcagtggaaggcgtgaaccaggcttttacacaatctgcctatcttaacagaatgagtgcccagccgagataaactaccgacttcttctatcctgatagaaagctattgttgaatttataaaacaagaacaagtatgaaaacattgaaatatatatccttgagggcattcgcaatcgccgccctcgcccttgtcttcgccatgccggcaaaggcacagatgaccgataacggttatgccaacatcgactggcagttcaatttccccttaaacaaccactttgccgacaaaggcagcggatgggggatgaactttgaaggcggttacttcctgacgtccaactttgctttgggaggcttcctggcttatcatagcaaccatgaatatttcagccgtcagaccttgccggtcggtacgagcggcagtttgaataccgaccagcagcataccgtattccagttgcctttcggtcttgccacacgttatgcgtggaaccgtggcggtgcattccaaccgtatgtgggcgtaaaactcggtacacaatatgcacagttgaagtccactttcaatgtatttgaaaccaataaagatacatggggattctacgtatctccagaaatcggtttcaacgtttacccgtgggcttacggtccgggcctgcacttcgcagcctattacagctacgggaccaacaaaggcgacctcttcacttacagtgtggacggtatgaacaacttaggtctgcgtatcggtattgcattctgacatacacacctaaaacttaacagaataaattaattgtttcaaaaaaaagagatgctgcctaacgatttcaagttagccggcatctcctttttttattctgatgcgattgccttacttcaacacagcccgatacatcgcttcctgtattctttcccgaatatccgatttcagcaatttcgcattccacacctccggataaatacgattgctgaggaatacatacaccaagccgttatccgggtctacccatgcacaagttccggtaaagcccgtatgtccgtacaccgatgccggagcggaaagggcgcagggacttttcgcaggattctgcacatccggcttatcgaagcccaaaccacggcggcatcccttggcaaccgtagtggtaaagagcctgcacgtctccttgcttaaataacgttttccgttcaactcaccgccattcagcagcatctgataaatctgcgccacttcctcagccgtggagaacaatcccgcattgccggaaacaccgccttgaaaagcggccgattcatcgtgtgcaaatccttgcaaaactgttttccgcaggaaagggtcaacggacgaaggcacaatttcctctttagacaagaaccgtaacggaagatacccggtacgcttcagccccatcggagtataaaactcttgagcaagaaactcatccataggcattcctgcacgtgcctcaaccacctgctgcagcagaatgaagcccacacagctataacgataccgtttatccctcaaaggcgcatccgctatcttttggagatactcctttttgaaagacttattcaaccaaagactgtcacagacctgtaaagtacattcagctgtacgtactttcgacgtcagccccggacggaaacgaaaattcgggttagcccacgtctgccgcccgatacgggcaggatgcagtttatccggtcgtgccttaaataatgtaccctcgtaactatcctcatcaatggcatcctgatagaacagcaaggtggaaggcaatcccgactggtggaacagcagttccctgaccgttatattgcgtttatccgtatcctgcaggtagggaagataatcagacacacggtctgtcaggcttaaacggcctttatcataaagcttcattacggccaataaggtagctgtcgtcttcgtcaaagatgcaacgtcatatacagatgccggtgtcaccggaactgcttccttatttccggttgtatatgtataagtaccgaaagccttattatacatctctttcccgtccttcaaaaccactacctgacatcccggataggctccttcccgtatgccttcccgggcaatcgtatcaatccgtgccaaaaagcgggaatccaggccatgctcttcgggaatgaaatgagactttgtctgcggacttaaggtcatcccttctccggcggcaaacaaactgccgatacttgccgaaagccggccgtcagccacggcatccgcataaagtatcccggccacctgccgctgtacgtcatcattcgaagaatgcgccaataccaccgcttcggctgccgatatgccctgacgtatctgtggcagttgcttgccgggaataaagcacacatacaccaccggaacgtccggagcaaactccgcaaagaaagactgataagccgccagacgatgctcggtaacacataccagaatacgtttatatccggacagtttatctctcaaagccttacgtcctgccgccggtaaatcttttcccaattggaactctaccggatgcgtatattcggaaagctgcttgataaaaggccgcatctccgctgcttccccgacattcaacaccgcaacatctttaatcgccggatccagtggcagcactttcgccgcattgcccagcacggtaacagccgccagattcaaacgacgaatcaaatcccgcgtatagggcgtattaattcgggttcccaatccggaaagacgaataagaggcttcttattcagcccaagtgcatatttataagtcaatacctttctgcatttctcctccaccgcctgctccgtcaactcaccgcgctttacggcagccagtatggcatccacttcttcttttatacgccggggaacgagcagtaagtcatgccccgcctgcaatgctttcaagcagagcgactcatgtttggaaactcccttcatagccaaagcatctgtgaagacaagtccccggaactgcaattcgcgtgtcagcaagtcataaaccacattgcgggaaagggaagaaggcaatccgcgctgcgcctcaaaagcaggcacttccaaatgccccaccataatgccgcctacccctgcctgaacggcttttctaaaaggatacaactccacactgtccaaacgctcgcgcgtgaacggtaaaaccggaagcgatttatgcgaatccacgtccgtatctccatgccccggaaaatgtttggataccgagagtactccgccgtcttccagccccctggcataggcgataaccttattggcaacgttcaccggattttcaccgaaagagcgggtgttgataaccggatttttcggattgatgttaacatccgccaccggagcaaaattcacctgtacgccgagttcccggcactgccttgccatttccctgccatactcatagagcagggtatcgttctgtatacatcccagtaccatattcttcggaaagacgggtgtaccccgcagacgcatggaaagcccccactcaccgtcgaacgtaatcagcagaggaatatccgccatgcgttgcgcttcattcgtcagcatagcctggttttgcatcagtccgccggaaaacagcaaaccgccgactttataatcctcgacaaccttgcgcagcaactccttgttgcccttgtcctgatagggggcgattgtatagataaaaagctgtcctatccgctctttcaggctgagtgtgcccaaaaccgaatccacccactgcctgcatcgcacatcatccactgccgacctcaccagcaatggctccacgggggaaacaacggcaggtgtcgccggacaacgtttcgcatccgaagcaaaacgcccgcaacatcccattataaccagtataaacagtaacagccttttcatccgctattccttcgtcagtgtcaaatccaattctcctacaaaaatgccgcttctcccggtgtgcaataccggaatactcttcccctccgcattcaggcagaaagccggtttctccataaaagtatgggaatggccgcccaatattacatcaattcccctggttgccgccgccagcttctcatcgcagacttcatttttaagacggaagccgagatgggaaagacagataacgacatcacacccttccttggtccgcaaaaggtcggttacttcctgcgccgcaacaataggatcgttgtatacaatgccttcacacttatcggcctgtaccagcccttccatcttgggactcaccccgaacactccgattttcatatctccgcgttccaggactacataaggtttcaccagtccctcaagaacggttccggtgacatcgtaattggcacataccaccgggaagtgggccatacggaacaaacgcgccatattatccagcccgaagtcaaactcatgattaccgatagtcatggcatcatagcccataaggttcatcatccggacttccacctcgccccggaaaagattgtaatagggagtaccttgcgaaatgtcgccgcagtcaaagagcaggacatccggattcttggtacggaaatctttcagaaaagtagcgcggcgtaccacaccgcccgcccctgcatacgggtcggcagcgtgcaggtcaatcggttcgatacggctgtgagtgtcacttgtgtgcagaatgaccaattgcttggtctgctgtgccgatgctgtcagcaatgcacagaacatcagcaggcaatatatagatatacgtttcatcgaattctcttttttagttttctgttcttaatcttccacggtgattcgtccttccatgcgcgaagtaatcttcttgcctgctgccgtctgttgctctacatagtccataaacagaccgcgcaaggtcgcacccggcggacaatctctcttttcggcctgaatcagggcggtcatatcgctattgccgtcggccagataatcgatagtggcaaccgtgtacagtttgtcgtcggcaaccggcttgccggctacggtagccccgagcaactttccgcttttggtaatccgcaacttcacaccgctgactccttcgccgccacgtgccgcaatgctctcaaacagttgcttcagataaacacctttcaaagtcacgacacaaagtgagttctcgaacggcagtatttcgtagatgttgccgcaagtaatggggccttccgtcagcacgttccgcaatccacccatattcacaagccccatatcggcaggttttccaagcacctgcgcagccgctccgcgcagcacatcggccaccagattggaaaggaggctttcgggagctcctttatccatagacatctcggcagtgcccactacccggtacatcatactgtctatcttcgccttgtagggggcaagcaacgccatggcttccgcatcgggagcaacatcataggtagagtctatcggctgcatgcgcccttcggcttttgtcacttcgtaggccgaatggcaagatgcaaacaaaaacatcactgccaacgctgttcctgagacgattttcaaataacatttcttcatattcatccatttttaaattgctacaaatatacttttcttttgctgtaatcccaaagaggaacggcatttctttccatccggcaaaaaagaaaaagagtacatctctttgtcaatcaaaagaaaaactctacctttgcaccgctttcgcgcaatcgctgtcaggacaccgagtgagaagcctggtatgttgcgttgtaacgatcaaacaatttaataataagaacaatggatttaattaaaattgcagaagaagcatttgctaccggcaaacaacacccgagcttcaaggcaggtgacactgttacagtagcatatcgtatcgtcgaaggtaacaaagaacgtgtacagttgtaccgtggcgttgttatcaagattgccggacatggagagaagaagcgttttactgtacgtaagatgtctggtactgtaggtgtagaacgtattttcccgattgaatcaccggctatcgacagcatcgaagtgaacaaagtgggtaaagttcgtcgcgctaaattgtactacctgcgtgctcttaccggtaagaaagcaagaattaaagaaaaaagagttaacggttaatcccaaactcctatttctaaataaaaaagggaagccgattgattcggtttcccttttttaatgtctcaaatacctcatcccacgaaatggaattattcgtcttgcgaaacggataaatatcctttcgcccgctatcccgtatgaataaaaaatgcgaaaagcaaaaggagtacaaacaaacctgtattttctacaagcattttcttttttcgtgggattaacaaagatttttcattatagtgaaaaaaacgtttgatacggttgaaaactttgtttggtgtatatccccaaaaataccgcccagccgagaaattatattccggctgggcggctatattttcaatcaaagactgagcttatttaatatctctcaactcccagcccaacgcactggctcccagcacagcagcatcagagtctttcagttcggacatcatcaatttggccttgcccttgtaaatcatcaggatattgtcatcaatagctttctggataggcttgaagatgtaatctccggacttagccaacccaccgaacagaataattgcttcgggactggagaaagcaatgaagtctgcaatagcctctcccagaatagtaccggtaaagtcaaaaatatcctgtgccagcttgtcaccttgaacggctgcatcgtacacatccttagaggtgatgttttcggccggaatggaacgcaacaaactcggttcggtacgtgcagtgaggaactcacgtgcagtacgcgccacaccggtagccgaacagtaagtttccagacagccgtggcgaccgcatccgcagagacgaccgttttcgcgacgtatgatagtatgtcccaactctccggcaaaaccgtcgtgtccgtataccatttgtccgttgataacgataccgctgcctacacccgtacccagcgttatcatgatgaaatctttcataccgcgtgcagcaccgtaggtcatttcaccgatagcggcggcattggcgtcattggtcagtgccgtagggatgcccaaacgttcttcaaacatggctgccaaaggaattactcctttccacggaagattcggggcaaactcgattgtaccgctataatagttgccgttaggagcaccgataccgataccttttattttatcaacaccgccatttgcgataatcagcggaagaagattcttgcatacttcgtctacgtaattgtctgcctcatcataagctcccgtcttgatggaaccacttgcaagaatagtgccacgtgcatctacgataccaaagacggtgttcgttccgcctatgtcaatccccactacatagggtttttccatgtttgaattcatgatatttacttttttgtttaaagggttagttataacattaatggttacaaattacacaaagaaaaacgacactgcaaaatctttttttaaaaaacttcacgtcaattgcaacttttcgtcacattgctgcgtctaatagttaaaatcaataagaacaaagctataaacaggaaaaacgtgatacaactgaaagacatcaacaagacctataataacggagcaccgctacacgtactcaaaggcatcgaccttgatatccgaaaaggagagttcgtctctattatgggagcgtcaggctccggaaaatccacgctcctcaacatcttaggcattctggacaactacgatacaggagaatattacctgaacggtacgcttatcaagaacctgagcgaaaacaaagccgccgaataccgcaaccgtatgattggctttatcttccagtcattcaatctgatttccttcaaggatgcggtagagaatgtggctcttcctctcttctatcaaggagtaagccgccggaagcgtaacgctatggcgttggaatatctggaacgcctggggctgaaagagtgggctcaccacatgcccaacgaaatgtccggcggacagaagcagcgtgtagccattgcccgtgcattgattacccgcccccagattatccttgccgacgaaccgaccggtgctctcgacagcaagacttccgtagaggtcatgcaaattctgaaagacttgcatgaaacgggcatgaccatcgtggtcgtaacccacgagagcggcgttgccaatcagacagacaagattatccacattaaagacggtgtgataggaagcattgaagagaacctgaatcacgacgcatcgccattcggcaaggacggtttcatgaaataacggacactgccgcgtcattacattaatctcctatcgctttataacatcacttacagtaatcatgatagacctttggcaagaaatatacggtacaatcaagcgtaacaagttgcgcacgttcctcaccggttttgcagtggcgtggggcatctttatgcttatcgtactgctgggagcaggcaacggcatcatccatgctttcgaacaaaacgcatccgaacgcgcattgaactccatccgtctgggcggtggctggaccacccaatcgtacgaaggcttgaaagaaggacggcgtatccaactggaaaacaaagacctcgccgcaaccgaaaaatactttcccgacaatatcatcactgccggcgccaccctgcggcagggagatgtaaacatcagcttcggacaagaatacatcaatatctcgctgatgggcgtacacccgaactacgtagagtccgaagccatcaagaccgcaagcggacgctttatcaaccggaacgatgtgaaagaacggcggaaagttatcattcttcataaaaagtcggcagaaattcttttcggaaagtcacgtacggaacctgtcggccggtttgtcaatgcaggcggtgtagcctaccgggtagtcggattgtacgaagaccagggagaccaaagcagcctggcctttatccccttctccaccatgcaaaccatctataacaaaggcgataaactcaacaacatcatcttcaccaccaaaaacctgacgagcgaagcgaccaacgaaacctttgagaaagagtaccgtaaagtcattgccgccaaccaccgtttcaacccggaagatgaaggcgcaatatggatatggaaccgctttacacaatacatacagacacagaacgtagccggcttgctgcgtaccgccatttgggtgataggtatttttaccctgctgagcggcatcgtaggcgtatcgaatatcatgctgattaccgtcaaggaacgcacacgcgagttcggcatacgcaaagcgctgggtgcaaagcctttttccatccttcggctgattattgtggaaagcgttacgattaccacttttttcggctacatcggcatggtggcaggcatcggagtaacggaatggatgaattccgccttcggcacacaaacagcggatgcaggtatgtttcaagccaggatgttctcggaccccacagtggatatcggcattgccatacaggctacattgaccctgattgtcgcaggtacgcttgccggattcttcccggctaaaaaggcggtaagcatcagtcccatcgaagcacttagagcagattaaacgattatgagaatagacatggatacatgcgaggaaatcctcgttacgataacaagaaacaagacacgcagtctactgacggcgttcggtgtattctggggcatcttcatgcttgtggcacttattggcggcggacaaggcatgcaggaacaaatgaaagcgcaatttgaaggtttcgctacaaactccggatttattgcagcgcaaaagacaagcgaggcctacaaaggatttcgtaaaggacgctggtgggatctggaaatggaagatgtggaacgggtacgcagcatcgacggaataaaaacggccactccttcatttgccttatggggacagacagccgtttacggagaaaacaaatacgaatgcagcgtcaaaggtctataccccgaatatgagcagatagaacatcaggaaatgacgtacggccgctttatcaatgacgtggatatacgtgaggcgcgcaaggtatgcgtcattggcaaacgcgtgtacgaaagcctcttcaagccgggcgaggacccttgcggaaaatatatcagggtaaacggcatttattaccgtgttatcggcatgtgctcttccgagggcaatgtgaacatacagggacaggcttcggaagcggttaccctacccttcacaacgatgcagcagacatataatctgggacaaagaatagatgtagtctgttttatcatgaaaccgggagtgaaggttaaggacgtagaaccggaaatagaacatcgcatcaaagccgcccattacatctcgccggacgacaaacaggcaatcatgttcctcaatgcagaagccatgttttccatgatggacacactgatgacaggtacccgcatccttatctggatggtgggcttgggaaccttgtttgccggagctatcggcgtatccaatatcatgatggtaacggtaaaggaacgcactacggaaataggcatacggcgtgccatcggtgcccgtcccaaagatattctgcaacaaatcctttcggaaagtatggtactgactaccgtagccggcatggcaggtatctcttttgccgtacttatactgcaaatactggaaagcgcagcgaatgatcccggagtcatcaagacccattatcaagtctccttcggactggctatcggcacttgcgcccttctcattgcattagggatgctggcaggactggcacctgcttaccgcgcaatggccatcaaacctatcgaagcgataagggatgagtaaaaaacggcaaggtaacagactgataaaacgatagaaaaataaaacaataatacaataaagatgaaaacaaagaagtatctgaaaatcgcatcactggcggtagtagctgccatatttatctggacattcgtgtttttgtaccggaaatcccagcccactgtaaaggtatatgagaccatcgttccggaaacagccgatttggaaaagacaaccgtagccaccggaaaagtggagcccagagatgaagtgcttatcaagccgcaaatatccggtatcatttccgaagtatataaagaagccggacaaagcgtcaagcaaggcgaagtgattgccaaagtaaaggttatccccgaactgggcacgctgaactctgccgaaagccgcgtccgtctggcagaaatcaatgccaaacaagccgaaacggactttgcccgtgtcgagaagttgtttaatgacaaactcatcagcaacgaagaatacgaaaagggggaagtgaacgtaaaacaggcacgggaggaattgcaaacagccaaagacaatctggaaatcgtaaaggaaggtatcaccaagaacagcgcttcattcagcagcacattgattcgttccaccattaccggactgattctggacgtacctatcaaagtcggcaactccgttatcatgagcaatacgttcaacgacggaacaacaatcgccacggttgccaatatgaatgacctcatcttccggggcaacctggatgagaccgaggtaggccgcgtacacgaaggcatgccggtaaagctgactatcggtgcattgcaaaacctctcgttcaacgccgtactggaatacatatctccgaaaggcgtagaagaaaacggagccaaccaattcgaaatcaaagcggccatccaggcgccggacagcgtacaaatccgttccggctattccgccaatgcggaaattgtgctggaacgtgccctcaagacgctcgccctgccggaaagtacggttgagttcagtggagacagcacctttgtatatgtactgaccgacagtgtacctcaacagaagttcaaacgccaacagatagaagtaggcatgagcgacggtatcaaaattgccgtcaaaagcggcctgactgccaaagacaaagtgcgtggcgccgagaaaaaagataaataaccgttatacttagaagaagcaaaaacgccatgaagaaaaagatacttatatatatggccgttctggcttgcatacaagttcaggcgcaagaccgctggtcgctacggcaatgtatagactacgccatcgagcataatatcgacatccgccgaacagccaatgcagccgaacaaagcagtgttgaagtgaataccgccaaatgggcacgactgccgaaccttaatgccagtgccggacaaaactggaactggggacgcacgcagaccgctatcaaggacgagagtaccggtgattactccaccgtatatgtcaacacaggcagtcacggtacaaatatgtccgtttccaccagtattccactgtttaccggactcgagatacccaaccagtatgctttggccaaattaaacctaaaagccgctcttgccgacttggagaaagccaaagaagatatctccatcaatatagcctcagcctacttacaggtactgttcaacgaagaactgcaccgggtttctttaggacaagtagagctgagcaaagaacaatgcaaccgcatagagcggctggcagaagtagggaaagcctctccggcagaagttgccgaagccaaagcacgtgtagcgcaggatgagatgaatgcggtacagacgggcaataactatcaactggcattgctcgacctcagccagcttatcgaactggaaacaccggaaggtttcctcttggaaaatcctgccgcaacaatagaacttatcccattggcttctccggacgaaatatatcagttagcattaggttgcaaggcctcaatacaagctgcacagtatcgtctggaaggaagtaaacacagtatccgaatcgcccaaagcggttactatccgcaactgactctcagcgggagtctcggtacgaattattattcgacaatcaaccgcactttcagccagcaaatgagtgataatttcaacaaatacatcggttttaatctgagtgttcccatctttaacagactggctacacgcaaccgggtacgtacagcccgcctgcaacgtgaaaactactccttgcaactggataatgccaagaaggacctctacaaagaaattcagcaggcatggtacaatgcggcagcatccgaaagcaagtatacaagcagcagcgcggcagcctcggcaagcgaagcatcgtttaagctgatgagcgagaaatacgaaaacgggaaagcgaacgccgtagaatacaatgaggccaagcagaacctgatgaaagcacaatccgatgaactacaagccaaatacgagtacctgttccgtaccaagatactggacttttataaaggagagcctatcgaataaatataattttagttgttgtgtgtttgtaaggagatgaacactttttatttattttcttttcaggcacggactacacggaaaacacagattttctttacttctttttccgtgaattccgtgcctgaaagaaatcatcaggtatattgaagtatcccccgtttatcagttataaatacacatggataagcgtttaatttcgtcttgacgcttctttacttctttctgacgaacgggaagaagaacgtgttgtacgcgtagaggatgaagaagagttgctgcgtcgtcttacgctttcgttttccttctgaatactctgcccgcgtttaggagcatttacttccttcttagtatcggaacggcgtaccggactgttggtagcaggacggcgattggactgttccacgttattagggcgcgtaccggaattgggacggatatgaaccgaaccgaaatccgaacgccggcttgtatggtacgatttattatcacggatacggaaagagccgttataggtaggatagttatgtctgccccggtaatagcttacattatgataatgaacacggttatgtccgccacagtaagtacgataatgataaggacgcggatagtagaaatgattcggattggtataagtaacataaatccggaaagaccaatgcccgccactcacataaatcggacggaagaagtaggcagcctgcatgaaacgggaatactgtctgcggctcaatacccaacgtaaatcgtcattgcgtatatccagataatcgtaataccgattcaacgcccattcttcacccctcagcacatcatccatcagataacgtacacctgaaataaagtcataattaatttcatatacatcattatactgagccgtattcagattcagttcataagccatcttatccgtaagaaagcgtgtttctttacgcactttactattgctcatggccgcatggcagacagcagtactcattatcacggcaaacaacataaataatattcgtttcatggcagcgttctttacaagtttatattccatcattttagtaaaaacaaaaataggggaatattttcccccatccttctgtttctctctaatatgttatagggaaaaccctattgcaggtagggattagagtttttttgccagttcaatcccattttcctgcagcgataccagatgttttttgtataaatcgccaactgcttttttaaaggttttcttgctgacaccgaatgtatcgtaaatctcttcggcagggctcttgtcatgcaaagtgatgtgtccgccctgctcacggatataatccaataaggtagcagcaaagtcttccaccttgccctgccccggtttctgaagtatcaggtcaatctttccatcctcgcgaacctgctttacataagccttcaatgtcatgcctgtatgcagaggttgaaatatctcgctttcatacagcaaaccgctatatcggttctcaataatagccttaaaacctaaatcagtcttctgccagataagtatgctgacttcctgaccgggttcataaggcgctttttctttcgaaagataacggtccactttggcagaggctacaatccggtaactctcatcatccagatgagcatggattacatattgcttcccaacctgcatcttcattttctgttcacggaaaggaacaaacaaatctttcatcaacccccagttgaggaaagcgccgtattgatttatccatgccacttccaaacaggcaaactcaccgacctgtactaatggtgtcagtgtggtagctaccaaccgttcctcgttatccaggtagataaacacagtcagttcatctcccggcttgcagttttcgggcacataacgcgacggaagcagaatttctccttcttcaccaccatccagatacatgccgaaatcaacctctttcaccaccctcaaggtattgaactttcctaactctatactcatacaaattatatttcgtaatatttataacaagaacgatacgcaatagaacacagcctattccggcatcctgcgcaaagatagcgaaaggtgagcgcaataccaagccaaaagctcgcttttgagcgcgggtactgccgagccgcatcctaccttgataaaaataaggaataacttttcgctctaaaagataacttttttatataaacaactcttccggaaaacggttatctttgtaacgtaacaatagacaaaagcgtttattattcacctttaaataatataattatggaatttattacaaacgaaaagctgaccattgtaggtgcagccggtatgatcggctccaacatggcacagactgcaatcatgatgcacctcaccccgaacatctgtttatacgacccttatgctcccggtctggaaggtgtggcggaagaaatgttccactgcggattcgaaggcctgaacctgacattcacatccgacattaaagaggctctgaccaatgccaaatatgtagtgtcttccggtggtgcagcccgtaaagcaggtatgacccgtgaggatttgctaaaaggcaatgccgccattgccgaagaattcggtaagaacgtgaaagcttactgcccggatgtgaagcacgtggttgtcatctttaacccggccgatattaccggcctgattacattattgtactcaggattgaagccatctcaggttacaacactggcagcccttgacagtacccgcctgcgtagcgaactttccaaacatttcggcattgctcccgataagatagagaactgccgtacatatggcggacatggcgaacaaatggctgtatatgcttctaccaccaaagtagatgggaaaccgttgctggatatcatcggcactcctgccctgacaaaggaagaatgggcagaaatacagaccaaagttaccaaaggcggcgctaacattatcgctttacgcggtcgttcttctttccaaagccctgcgtatatttccatagaaatgattgctgccgccatgggtggaaagcctttccgctggccggcaggcacatatgtacacagtcatggtttcgaccatatcatgatggctatggaaaccgaaatcaataaggacggtgtgcactacaaagagctgaaaggtactcccgaagaagaggctaaactgaaagaaagttacgcccacctctgtaaactacgcgacgaagttataggaatgggcgtattgccgcccattaaagactggcacagtatcaatccgaatatagattaaacaactacgtagaaatctatactcataaataatacaaatatcccctttgttcttgttttaaaagctacaaaggggatttttctaatatttttcctcaaaaagccttgtagtataaaaaaatatctttatctttgcacccgcaaacggaaaaggtgccatagctcagttggtagagcaaaggactgaaaatccttgtgtccccggttcgattcctggtggcaccactcgaaaaacttttcactcttgaaatcctctgaaattcagcaatttcgggggatttttttatttctgtcacctacaaaaaaatgcagatttaagaatttaaaaatgtcccattcggtggtttttcacacccccttttaaaaaaccaccaccagctttatacttcacttattttcaactatttaaacaatcatctttcaggcactaaagagtacttttgcagacctgcttgaatgtggtgaaaaagagatcggacgaaaagaaaaaaacgccgtatcccggaaatataaatttccaaaggaaattccgtttttcctattccgatggttttctcggaaaaattcggtggttttcatatccttcaaataaaaaaaccaccgaaaagacatcccttccacccctttccggttgacaaagtaaaacatgtccaacaactaaaaggaaacgagtatgaaacaaggaacaatgaacatcctgttcttcattctgaagacaaaacttctgaaaaacggtgaggcacccattcttatgcgtataaccattgacgggcattacgaagaggccagaatacagcggagcgttctgccaaaacaatgggattccgccaaaggatgcagcaagggaaaggacaggagtgccaaagaactgaacgcctacatcgcagaactcagtgctttggctttgcagaagcacaaggaactgatgctcgaacttgcactgatcacgcccaaacttcttctgaaacgggtattcggaaaagagacggaaatgcgtaccctgctcggtacaattaacgaagaaatagaaaaaatgaaaaaggcagtaaacatagattatgcgcctgtaaccatcaaccgttacatcaacgtgatgaaaaagctgcaaaaggccattcctgacttttacgggaaagaagacattacgttccatgaattgaattccgattttattgccacgtttgaccttttcctgaaaacggaagccggcctttgccggaacaccattgtccgttatatgaaatgcttcaagcgtattacaaacatggccctggctaaagaatggatgcgcaaggatccgttctacggatacaagatggcacaggacgaaaccgatcccgtattcctgacctatccggaactgaaaagcatcatggagaaagaattcaccatcccccggctggcactggtacgcgacatctttgtcttcgccgccttcaccgggctggccttcgccgatgtgtccacactgacaaaagacaacctcgtacaggacaacaacggtgactggtggatcagaaaaggacgtgtaaaactggagcgcagacaccgggcatcttctgtctgcaacatccccctgctgccggttccgcttgccatcctcaaaaaatacgaggaacatcccatatgccggaaaaaaagcctctgcctgcctgtcatatgcaatcaacgcatgaacagttatttgaaggaaatcgctgacctgtgcaatatcagaaagaacctgaccacacacacggcaaggcacacattcgcaaccaccattacgctggcaaataaggttccgctacaagacgtgtcagtcatgctgggacatgcctcaacaagaatgacgcaacactatgcacgggtactgaaccccagtttgaaagaggtcatggacaatgtaaaaaatgcactggcgcaataattcaggtacaaccaattgattaaagctattccgtttataacgggatagctttttttctgtgaaaaagatatttctacttcttacttgcaaaggtagccttccgcctttgattgggcaaggcgaccgccctttgggcggttggctggaaaaaaatcatcctcgcttcgctccggtatttttttccgccaagccttgcgcaatcaaggcagaaggcaatttgaaagcatgtaagaaatagaaataccggctcatagagccggtcatgtttaatcaaaagattaagattatgactcagacagaaagagacatgcaattggtggaatcccaaccactgacagtaaagaatgcgcaccgggttgccatgattcgcaaaaaggaaagtacggagccgcccgttcctttccatttcaggaaaaagcacctcggcatggaaagtttcgtacatttttcaggaaagccggaagatgaaaaagaactgcggccggcagacttcaaggactgggaagtgacggagttcaaatatcccggctatctggaagacctgtgggaagccgcctgtaacgcctacagatggagttccttcgatccggacatacggggagaatcggacatcatgatttacgagaaagagattcacgacgacctgaagagaataccggcagaaaggcatgaggaatacatcaccgcctataaacagaaatttgccgcacagctttccgcccttgcccggtgcgccagcccgatggttaccggaagaagcggattcaacgtatacaaacatgagaaagccaaccggacttaccagaacagatacgaggaactgcggagctggcgggacaggattttgaaaacgatggaacgtacaaaagaggaaaagcttcccgaggaagagaaacaggaaaaggcctggctttccctgaagcgggacattgaaagcagtgcggataccatccatgaacttgacacgggcaaatgcagaggatacaaccgcgcccttttcgtcagcagcatcctcaacaaggtcagtacctatgccggtcacggagaagtggaaatcgtgcagaaagccgtggagttcatttccgaatacaacacaagggtgaagaagcccatcatcactccacggaacaaattcttcaccctgccggaaacggcacgggagataagggaaaaactgaatattgtcaaagggcaggaaaacaaggagcttgcctttgagggaggaacgctggtctggaattacgggaaaaaccggctgcaaatactttttgacaggattccggaagacgacaaacggaaagagctgaaaacctccggtttccggtggtcacccaaaaacaaggcatggcagcgccagctgacacctcatgccctgtctgccgccaaaagagtgttgaaccttcaaaccttacagccatgaatgaccaatccagatatattgtcgattcacgttacttcgacgggacatgcctgaccttcatgacagacggattccgaagtgattttggtggagaaacgcttgaagagatgcgtgtacgggaaaacaacccgtacctgacatccgtcacccgtcaaaggattgacaagatgctgcacctttaccttcaggcactgtccgcaccgttcagtgaaatcacaaaagaagaataccatgacctgatggatgtcctgcctcccatacgtttggagaaagactcctttttcgtcggagaaccatattatggagaagtatatacattctgttttacaaggaaaggcagatatttcaaaggactgcgttccgaatatacttcccggacagaactggacagacagattgcccggcacatggaaaccgtcaaccggaaagctgcaatcctgaaagacagaccggacaatgcaggattaacaccctattacttctcactggaagggaaacagccggtcttcatctgcaacctcatcatcggatccgacagcaggcaggcaaggacggatatggcctgtacattaaaaagcctccgtaaaaaccattacctgttttttaaaggaaaaggaaagtatgagacacccgaggaattgttcacagaggtctcccgtaacaaacttaccctgatttccgatgaacatttcttccaatacccccggaacagggaatcagtcacctttgtcggacggataaaggaaacggccggggagtttctcttccgcatctatgaccgtgaatactttctatatcttctgaaaagactgaggacggtaaagagggagtccacacgggaaaccgcaaacatcaaatcataagtccaaccggggaatacggagacaagttcctccatattccccacttaaaaatataagacatcatgaagacagacaacaaactgtactggaaaaccgccaccgaaccggtggaaaacatcgtggtcagactggtccttgccacctatgcggataatgacaacctatatgtaggattggaaaagatttccggtgaatctcctgaatgttgggaaacctatacggacatcaccgtcaactgcaatgccctgccatcattccatgcgtatgtggacagccgggactgcaacaggcatgtgtatgacttccttgtccgtaacaggattgccgaacctacaggacacgaatatcaaggcttcaggatgttcaggttcaacccggaacgtctcaaagagctttcgccggaacaattcggaagcatattcctaaactctaccgggcaggagcatacgataaaagaattcgtttaccgtgaagagcggtttccattacgcatcatcaggaatgaccacggtaaataccttatagcaaccgaaagactggaaaaagcgctggaagaaggcgtcaggaatctggatgccacagcaaacgaactgctggaaagcatctgccttttctgttccggacaagagctgcactccctcaccgataccgaactgatagagagaatcaacggacaatattcagaacaacaatccacgcctgtcatgaaaaaagaatacgaagaaagcatacaaaagtatgcaatatactgatagagcatcggagcaacgggaaactacctttctacaaattcggaggaaggatactttataaggagaatgacatcatccggattctggaacagaaccggatggaagctttcaataccgattaaccggattgcctttctgcccgcttcccacaaaaagcgggctttttttaacagccaccaaatgaattgataaacagagcaacatagaacagtggtaaacaaatacaaaaaaaacacctcaatctttttggaggaattgaaccttttgcttatctttgcagcgtcaaaaagatgacaacatgaattgttgaaataagaagaagtttatctaaggctgattcagtggtttcaataatttcaagatatagaaaaacgctgagtgccaacatattacgaacagatttttaaagaagttcgattcctggtggcaccacttttcgaaaaaggtatcggaatgtagcgcagttggtagcgcactacgttcgggacgtaggggtcgggcgttcgagtcgcctcattccgacacgaaaaaaccactgtaaaagcagtggttttttatttatattatcacccgcaacatcagatataaggttcctttggcagtaccttgcaacactatctcgaaccgctccccactgcggaatcttctttacttgtgcactgagctgccagataaaggtaaagaggtaaagcatgcaaaaggcaaatctcttgaaatgttccataatcttttatttaaaatacggtttcatcgttgaagcgtaatgcccattattcctatcaccacctcattggagagtgtctccagtacaagatgcgaaagctttttccctgcattcaacggcatttccaacagtacggcggcaccaccgtccacctcgcgagacactccggtaaagccaagttcctcaccgaaattattgctcagttcaccggtcttcagacgcaggcgatagagagacggtgcatgacgattaaaagactttccatcttcaaagaatatctgttcgatgggcggccagttgtccggatttaccaaagacaaggtgtcgcaagtaccgtcttcataatacacacggattacgccattgtcgatatggcactgcatgtggttagtactgcctgccattagtaaataggcacgggaagccttgccttgcaggggaatttgcagactgtccggataattgtcccaaagagaggtgaaagcaatgttatgcccttcggcaggagtacggaaaggtatcccgagctttgtctccaacaagcctttacgcacagcggcacgcaaacccgaatcatctatatctgctgtcttcagcggatgacaccactcgcctattccctgtttgggcaactgcaatgtggtgtacggagaacgtggcgacaggtattcattgcggaaaatatccgttacattcgcattgaacactttctgcatatcgacaggagtgcatcgggctgaatcgactgctttaaaatcacctgccggaacaggtttcttacccttatcggataccgggtgctctaccggcgcccaccatttcatctgtccctgttccatagcaatgaaactgacggggcccgccttacggacgcgagttgcaggataagcgtcgacagaagcaggagcttcaagcaactctccttcccaagcaacattgattgttacctcctcaccggaagcagcaggaacggaaacggaaagcatgggccgtccaactgaattttcaaccagtctccacgctgcattctggccgtttaccatcaaacgcgccacagccgaacgacgtgcagggaattgcaattccagattccgtacggcaggcaaacggtgtgtaacggtataaagcgaacagtcgcgggaagaatacttaccggtagccgcttcgcccgctttaaagtcaaagtcgatatccggcgtatgcagtgaagcatactcccactcttccgggaaaccgggttttatcagcagacgaccgttcaaagcatcgggcaagattccgtaaagcccctgaatcaatgcgcgggaagccactccgatagggtcgccgaagtcgcggtaacattcgccccgggcagcatcatagaaacttatctgcccgaaattgcccggactatcgcccaggtacatgccgtccagaacagaacttttcagcaatttgaagcctgcctctctgcgtcctgcctgaaaataagcgagcgacgtgtgcatcacttcggcaaaggccacattgttaatgctccataaatacggcatccagtcggtagtggccacagtggcatactttccggcattgacgacagcacccgctgccttcaactgttcctgccaatgagcgtacgggcctgcattgacaggcaaagcagcatcggcggcaagcacgtcatccgaagtcacgacaggaatatgaggaatttcacggtctatgtaacttgtggcaagatatgcctgaaacgaatcggccacatcgctgtcgagagcgtgatagacggtccatacggcagcatcttcatgcagacggcgatggcccatgaaatcttggaattccgcccaatgtcctctctccggcaaccagagacgggtgttgagcgctttcaatatcttatcggcctcttcccgatagggtgtggggtcttcgcctatcttctcagcaatcagtgcagccagtttattgccgcgatagttataggcagagctgtgcgtaacggcgccactgttataatacagcgcatcgcttgcccaaatgcaggcgtaggcatcgtacaagccgtcgttgtccgggtcgaagttgcgtttttcccaagcaagatgcagtgtcagcaacggccacatgcggcgggcatactcaaggtcgcccgtccagttgaagtgccacaacagttcgtctatgtaacagagattcatgtcataatggtgcatctgattgttacggcgaggattgcggcagatatatccgttgctgtattgcggcgttccccatatcttggccgaacgtgcaagcgcaagggcagaatcctgtgccggatgcgaaatcgtattgggaacttcggtcacctgactggcagcatagttgtcaaaatgagtgcgtgcgcggtcgtgccagcccaacacatcgcctacgtatgcggcacgccagccgctcaacggcatacgccagccgacagctccatgcagccacacgccctcttccccccagataccgtcggcagcaacagcaagtgcaccgccaagcgtattgaaataaggatcgggagtagtgattctgatgcgttcggccagttcacggcaagccttttgaagggcaagatactgtacaccaccatcccgtatttccttcagttcattaccggaaatgcccacatacaaatgcccgtcggccggaaagcggcatttcagtgtttgcagcactgtgccgtcttctgccggctcaaaacatcccggagggtctgcccccatatctccgctacgggaaagcttcttccggcggatgggcgaattcaacacttccagctcgcagccggcaggcaactcaccggaaagctcccaaacggccatctcttccgtaagacttgccaatacggaaactttcaggctgcaattttctccccatgccttgtctttcaaggcatacgtacgcgtacccggattataacgcgcctcgcaccaatcggtttcttccaacggtgtaaccgtaccgtccggcagatgcaagcgaaaacggatattacggcagtcgttcttgacatacgtggcaaatatcggacggtcgccggtttccaggcgccatgccgtatgtccgccatacaaagcacgtgtgtagcggttcttgccgttgacgcagacaaactcttcaccggacggcaagtattgcaacatacggggagctccccgcttatggtcattgtaggaagtggattctatcaaatcacctgctttcttcggagttttagacgaagaagcatattgcgcgtaagcccccaaagggataaacagagtaaaaataattgcaaaaacagaaatacggttcataaggttttatttaattcaaaggatgaaggcataactgaaagccattcactatacgattgaaatacattcagtatacgactgaacctatatcagtcgtatactgaatgcaccccttctgcaagctattcagaaaaggggtagtacggagtagtcccagattagttatatataataatatttatatacaaagaggcaattatggcatcggcttcaatccttcccaacgcacatcccatgtaccgtcttgcgggaaaccgggattcttcatctcacacccatcccaaccggcacacatcagcgctacggcagtcagcaagccgccattgcccggcaggtagcaacgcagacgtccgtcctgataattgtgtccgttcaacaagtaagtattggtgcgcttatccatcagcaaggcacctacagccttttcgggctcacccaaccgagtggcattcatagcggtcatcgggtaatcccagccccatgtcttgccccagttccagttgtcccacacccaatgaagcgtattcttcatatagtcagcacgtatcagcttgttcatcggcaggatacccacagagccaagcactgccatgtggtcgctggtgaaacggatatccttgtaagtatccactgcattttcggcagccagataaaggcagtcttcattataggccagcggagagagtttgtctatcatctcatcccattccagattacgcttttcaccggcacgttcacgccactgctgagccacattcatggcataatgccagtaagagagttcgaacggcggattgatggtagtagccgcacgcaatgtttcttgtgcgggaatagcgcctttcaggataaaacgtccatggaattcatcgtaagtggcgaaagaatacatgaactttgcagtttcctgcaccagatgattgtatttcttaatcacctcatccgaaggattggcacggtaaacgagttcggccaaatagataaaatgcggttgctgccaaatcaggaaactgcctacattagacggagcttccgttccgctgggatcggtcattttcatccaacgcactccgtcgaatccctgacggcgggctatctcacgggcaacaggttctaccgtttcgtaccagccgagtgtgcggtccagcaattcgggatgcccccaaagtgcctgccaagcctgatgccaccatatcatttcgaggtggaacttgccaaaccatgaattgtaggtcagtcctgtttcctgcggcggaacactgcctgccgactgaatggcgagcaggtattggctcaatacgacacggcgttccagttctttggcacgcgggtcggtacaatgtgagaagtctacagccgcaccgttcttccagaaattgttccaatagctgttgccggctgccagagtttcggcgaaagtaggcagagtatcggcagatgtatagacagccggttcactctcgaatacagttccgggaaaagcagacgtaaacttgcaagaaaaagcgagtttatcttccgccggtgtcagtacaaaatagtttgcagacttctccttgagggaagcttttccttcccaacgcagagatacataataaacggtagaatcgagtgtacgtttgagaactgcactttgcgcattctcaaagactatatctgtagtgtgtttgttgttggcatcccaattgcaggcatcatcggcatgagcgcccgtagggtatggaaaatgcagtttcaccccagcacgtgccggactggtgatactggctgaaatcatgtccatttgcggatgacatacggtctgtacatcaaaggcgttacctttcagtgtgaagtgactgttgatgacaccgttccacatatccaatgtctgggcaatatcggtaatgtcagaagtcttcacatcatcgcccaactccagtcccacgatacccaaatgcaggcgatgagggttcatgcgataccaattggaagcttctttctgacgtccgtcttctttaaactgacaagcgtatatttctttatgtccacgaccgaaatcgtgttctttcaagtattcttccggtttgtatttattgggattaccgaaactatgccagccccattgactttgcgtacccaatggcacgcctttcttatatactgaaggaaaagtctgtagaccggtagcatccacagtaaaggcaaactcaccgttgccgaccgacaacgacgccaacgaatcaaacgaagatacctgagggttgttacgggcaaccagcgcctcacgatctatcggcgcttgcttttccgaaccgcaagctgccaagacgactgcaagtagagaataaaacagttttttcatggtatttttagtgtaagtaatatatctcatagttgtgaacgaagcaaagataacgcatttccgccaaaccgattctgtccggtttggcggaaatgctaagagaaatgattatcgggcatacactgcccaagctgtcacagaaagtcaaatgccaactccagtttcaatccctcatccccttttttgatacggatagttccaggctgactctgcggcccgtgctgacttatcggcttgaaagagcgaatggcgggaatatccaataagaaagaaagatccccggccggaaagtccggcattgtatggataccatcctgacgcccacgaggttcatccggagtgaatacacgaaagaacactccgtccgtagccgcatagacggtaaaagcattctgcttgccttgaattgtggcccaataaagattggcgtgataccctttaaattccggatagaccagtttgtccgcactctctccggtaacagtattattaaagtctttctgccagataccgtaattcgtgcccggaatacggttcttccacacacggtaaggaccgcgccccaaccaacgcatacctgtacattcgctttcaggataagagaaggtaaacccgaagttaagtatggcattatccgtaaaagcatcatcaaagccaccaccgcccgatgcccggttcagcaatacggcatccatcttcaacagcccgtccggacgcaaacgccacacaacggaatccgctccgccccgataacgggcacaaaggacagcatcacctctctgctccatacgagcggaaagagacaccagtttcatttgcattcctacaggcagcggaccgtctttcaacggaattatccggttgtctttcttccgcaatacagaatatatggtagcatcgtttcggcgaaaggatatgtccacccaatcggaacacaacgttattaaagaatcagcctcgttcacacaacaaccttttcctgttcttttcaaagaagccagttgcccttcaaaatagcttttcgcaaaactgatgggatacgtacgtgtacacacgctctttccatccagtcctatagcctccaattccaaaacatctcccttagagaagaatttttcccggatttccggattctcccatgcagctatacaggcatatccggtttcacccggttccaaagcaggcaaattcacccggccgctgtctactgtgcatccctctgcccggctctgtagcggggaaggataggaaaggacgcgatagcgcatggaacactccttcaaattagtaaacagataacggttctccactaaaaaacgaccattgaaagaaggcgttagctggagaggctttatctttataggcgaccatatttcccgtacggaatagaaactgccttctttctcccgataaggacctacaataccgtcaggcgcattataatcttcactgtccaaaatgccgttacagtctgtccggcgtacagcttcatcgctatatgcccataaaaaacctccggcaaacaaagggtgtgccgtatatcgcgcccagaaatcctccagtccggctccatgtccctggtcgtacagaccatgcataaactctgtcggcatgaaaaccttatatccgttggtgaaacggcctacaccggtcaggtaagccgggtaatggtgtgtatccaattcatcaaagtccgcccaaggatgaatgacatgacggcgttgcggatcataacggtagaacagtttgtccgtagctatattccacccgccttcatttccattgctccaaagtacgatacatggatgatttacatcccttgctatcatttcttttaccaacttgctgcctgtaacagtgtcgtaagcattctgccagcccgcaagttcatcaatatagagcaatcccaacgaatcacaagcatccagaaaatgctcatcgggtggataatgggaacgcacggcattcatattcatttctttaatgagcagagcatcttgaatgctgagttccttattggtggtacgcccgccatcggggtgaaaagaatgacggtttatgcctttcatcaccagtttcgtaccattcagataaacaccgtcgcgtggacgaaagtcaacggtacggaatccgacgcggacagatgtccggtgtaaagcctccccttcttcattccgcaaggtaacaatgagattgtaaagccgaggtttttccggagtccaaggttctacatttttccaaatatgagcaaacacactgtcatgccccacttcccacatccgaacctccgaacaaacgtccgttccatccaaaggatgtaaagctgccgttaatttttccttgcctttcactcctttcagctcggtataaagctgcatttccccatccattttcgcatccactgcaatatgttcgatacgtatctgaggtttggcttctaaccatacaggacggtaaatccccccaaacaaccaccagtccgccttacgttcggccgcattcaccgacttatttccggaatgtttttttacccgtacttccagcttattggcagcaccatatttcaacaaagaagttatgtcataggaaaaacgataaaatccgccccgatgtgtttctccggccgaaactccgtttacaatcacatccgtatctgtcataaccccatcaaaccacaaacgtatgttcttacctctccaatcttccggtacacgaaatgtatgacgataaatcccctcttccatactgggattcttaacccctttcttcttataccaacgcccgtaggtatattcaccaaaaccttgcagctcccattgagaaggcacttctatcttactccacttcccgctgttcctaccctcggaacaataaaactgccaggttacaccatcgcccagtccggtaccggaaagataacggcgctctgtctgctgagaccatatgcaaagagcggacaatagtcctaaaacagtaaaaaagattcttatattcatacttcttttatatggattttaattttcgaaaataataaaataatcaaagaaaaaggcagtctgactttcacaagttaaccgcccatttttcactaacccaaattataataatcaatcactcatcaataacgaaggtgcaatacgattccttactcacccggcaatggccaattaggagtaggaatacgcatcgctttcatctctttttcgaactgtgctactttttccggatatttatttgccagattgacagactccgtcatatcctcttttatgttatacaactctaacggagcatctttctttacagtcactactttccaatctccacatcttgccgcacgttgctttccagggaactcccaatacaacaaacgattatccgtatcaagctgttgcccataaaacaagggaagaatattgataccgttaagtttttgtggcaatttatctgtagcaccagccaaagcagccaaagtaggcattacatccgggaaataaataatattattcaatttctgcaccggaacctttccgggctgatttacaataaacggtacgcgaatgccaccttcataaagctgtcctttcattcctttaagagaacctttacatcccaattcctccaacggtgcctgcttggcagcaccgttatccgatgcaaagatgactaaagtattttcgcgcagccccaacctatccagttctgccaacaaacgtcctatcgcccgatccatatgggtaatcagcgaggcataacgcttggtgttcatatcccaagcctcatcatcataccaggttgtttcatctatattatagggttcgtgcggcgcatcataagctaaatacagaaaaaacggattgtttttattacggttaataaactttattgcatcttccgtagaaaggtctgtattatgcttgatgtgtttatcaccttcattctcttttacattctccagtttctcgttgttgaagcgccaataaggatagtagtacggatcattagaatatgcagtactgataagccatccgtaaaactcatcaaaccctcggttcaaaggagttgcttccggattaaatccgtccaaatgccatttgtttaccaaacaggttctatatccggcagccccaagcacagtggcaatggttgtatcattcggttgtaaatgcatgcggcgtatggtcttggtgccttttaatccttcaataccacctgcaatacaaaagttatcgcgtatagttgtatttcccgtattctttcccgtcatcaaggcacaacgggaaggtgaactgataccggaaccggcatagcattgcgtaaaggccgttccagtagctgccaaacggtctatattaggagtttctatatatttatttccataacatgacaagtcgcaatatcccatatcgtcggccaagataaaaataatgttcggcttgtctccaccgtctgttacaagttgccgggcagtcatcaactgaggcataacaaacatacccgcacaaactccacctaatactatatcttttctaaacataatctgatttaaataaaggaaaaggtggcataccttttaaaagcacccacctcccctttttaataacttaaatttaatgtagccaaggctaagatatgatatttagccttgataatcaaacaaatagcatcaattttcatatccctcgttttggacataaagtcctggagtaacattcatctgattcatcggaattggatagaggtaacgaccttcttttaaatttgctttcaattcagtaaagttataacgctcaaattttgcttctgtatcttccttccaagtgccataacgtacttgatcgaaccaacgaataccttctcccataaactcaattttacgttcaagtttaatgtatttcatggcatcctctacactaactccagtctcggttctcggatcgcagtttgccctttcacgtatttcatttacaattttcatggcatccgcagtgttaccttcactcgccaaaatctctgcataaagaagcttcatatcttcaatacgaataataggtagatttactccccagtcatcatactttttcatgccactctctgcatcaaaagacatccccaaagaggctattttagttttagtaggaatcattttataaaacatagctttagtatacacattacccgtagttccatcttcaaaagtcatcaactcagaagggctctgatattcaggagctaccgcatcaccagcaaagccagccatcacaccaaaattatagccacgtccgtctttttttccattagagtattcacgatcaaattcatgcatcaatgtcttttccacataaatagaattttgcgaaaaattatagtttttagaccaatcttccggaacgattttaactggaagcatattgaatatggctgggtttcccgtaccacccgtacgatactgaatggcgaaaatagaatatttattgtaatatgcatcagtcggcatccactgtttttgccattcttccaatgatggtgcccaataagcggctgcatgagaatcatctaaaacgttttccaattgcgttttagccaaactcttcgcattagtatcattatatggataaccagccaatgtcatatacacacgtgccaacatagccttcgcggccattttatctgcacggccttttttatctattttagcaccattggcatcttgcatatctgctttataaggcaaatcttctgactttttcaaatcaggaataacacgattattgagaatatccactgcagtagattgctttaccgatttaatctctgacggagacatcggtctatctaccataggaacatttccaaaaagacgaactaactcaaaataagcccaacctctcaggaaataagcttcatttaaaaattgatttctgatagactcggaatcaaaagatgcactcggaatcttagaaatagcgacattggcatcataaatgaccttataccacatattccaagtatcattaaacatcgccatatcatctgttgctctaaatgttcctatttcagagtattcacgaaaagcgtccggattaggttctacccacgcaacatctgaacgacattcagacataaaccaatacatgcaattagatgcttggcgcaaatccgcataaatgcctaaaataccttgctccgattgagcttgagtttgataaaatccatctgaagttattttatctacaggtggagtatccaaataatcatcacacgaggagatagtcacgaccagcgcagccagccatattatatttttaagtttaagcatagttctttgtattaaggattaaaaattaacatttataccaaaagtaaatgtacgagcattaggataaccaccataatccagtccaagtgcacttgctcctccaggacctgagcccacattggcagcttctggagaatacccaccataataactatcccatttggctagattctcaatagacaaatatacacgtgcatatgatataaatttaggattaatcggtaacttatatcccagagtaagattcttaatacgcaaataattagaagaatataaccatctggaatccagcgtagtgccagttgtttgactcaaaatataaggaaccgatccgttgcctggttcatcttcagaccaccatgcatctctccaatgccccattatattagatttagctcccatacttggacggtctatagcacgtcccaagataccataaattttacctccagtttgtgctgttaataagattgataaatcaaaattcttataagagaatctattagtcataccaaatacaaatttaggtgttggacttcccaaatagtctctatcattatccttatcatatttaccatcattattgacatctctataacggatatcacccggttgaatctgtttaccttcaaatgtaacgggttgtccattatgagctgcactataagcatcaatctcagcttgatttttccatactccaatagcatcgtacatatagtacgtattgacagctttacccacagtcaatatatttgagtaattgcttccggagaatccagaataaataggagtattatccgtacccaacttctttacttcattcttattatacgacatattaaatgaagtatcccatttaaaattccctgtcaaattatgcgtattcaactctatttcaaaaccttcattatgaatatcacctaaattatcccaaatagtgctgaaaccagaagcaccttctacgggaacttgatataataagtcggtcgtattttttgtataccaatccaatgacaattgaatacggttattcaaaaagcccaagtccactgcaatatccgtactatgagttttctcccaacctaaatcagcattacccaaactactagtataataacctgcagctcccccatagacggaagaagtcaaagttgcataagcagctgtattactgatagaattattacctgtcacaccataactagctctaattttcaatgtattccaccatttttgatcccaattcttaaagaatttctcattagatataatccaaccaccggatattgcagggaatacaccccatttattattaactccgaaaacagaacctccatcaaaacgcaaactacccgaaagcatataacgttcatcataattatactgcaaacgaccaaatgtagataataatttattaggtgtctgttctgttactgtattagttccagcggcaacctttgaaccatcaaacgaacctgtaatggcatcattgggaaaaggagctttgaaaccttgttctgttttatatcctaaagaagattgttctgacgaaaaaccgagcatagcgcttactccatgcttattgaatgtatgatcataattagctacagcttgtaataaagtattccaaatacgacttgtagagtggctacccgaagaagattggccttcaccctttgcccaacctttgcctgaacttgaaaaagaatatttgtttccatccaaatcataataatttgctgcagcagacaattcaactcgaaaatcctgaaatggagtgatacgtaagaaagcattaccgaccatacgtaatgtacgattttggctaatatccgtattcaaaatataacttggacttgaagttgtatctgcccatccgtaacggccgttaggttgtacgtaagtcatatatccgacacccggttctgaaaccggagcagaagaaagcgttttatgagcttgcgaatccttaccattagcacgtcccgagccgtctgttacaatataagttggagctaaattcattccaatagaaagatatttatttatttttgactctacatttgcacggaaagaaaaacgcttatagccagttcctgtagctaatccctcttggttcatataaccaccagaaaataaatagctgacattatcagtagcaccggacacattcaaactataatcctgtacaatagcggtacgataaacttcatcttgccaatccaacagactaaggctttccgaagttggagtataggtatgggaatctctcatatcttgacttaaataattaaaccaacggtcatcaagaatatacaaataagcgttatctgtaccagccttaactcctacatttgccaaacgcgtggcattatcatcgcggatactagcattagtgattcctttcttttgagcttcagataaataataagcatcattccatcttgttctgaactccatccattctgtagcactcagtaaatctattttcttttccaaagtttgaaaaccaacgctagcattaaaagaaacttttggtttacctgtttttcctttctgcgttgtcacaataactacaccatttgagccacgagaaccataaatagctgcagaagccgcatctttcaaaacttcaatagaagcaatatctgccggatttattccacttaaagtagtcataggaacaccatcaactacataaagaggatcggagttagcatttaccgaagcagcaccacgtacacgaatttgcatatcagcaccaggttcaccggtagtagtacgtaccgttactccagccaattgcccttgcaaagctgtttctggacgcgccaaaggacgatcttgaattcctttagtatccatttttgccacagcccccgtcaaagtacttttcttcacagaaccgtaaccaataacaacaacttcatcaagaacttccgtatcttcttccaaagtcacttttacattgctttgtcctttcaaagcaatatcctgagttttataaccaacgaaactaacttgtaggacagcattttcctgaacattgttaagagtaaagttaccatcaacatctgtgatagtaccattagtagttcctttcactaaaacactcgcaccgataactgtttcacccgttttgtctaatatgacacccgtaataattttgccttgtgcaagaatgtttagatgacagcttattaaaagaagcattaacaagcataactttttgtgtaaaattctcatagactattaatataaattggttgattaattaattcaagattaaccgtccgatgcaactgttatcggacacagagcttatgaatgcaaagttaaatatagacaaacttaacaaaatacacctactgatacaaatactatcctttttgactttctcttaagaaaaaaggaactttataaataataagaagctgacaatcaaagtttttataacaattttgatagtagactattcattttgacattaatcaaaatcctcgttctccacctcagtctcccgaccaaaagaacgatattccaatggggtaaaccctgtgcgctttttaaataatgaaaagaaatgttcggtagatttataatcgagcataaaagaaatctctttaacggaatgagaagtaccaaccaataattgtttggctttacgcaacttcaactcctggaaatatttagccggtgcataacctgtatagtccttgaatactttccggaaccaggaatagctgatattcaatttcatagccaactcttcaggatcaatatccttaaagacattctcattcattataatcttggcctgttcaatcttctgatcaacatcgcccacctcaaaaattttatttttagaaatggacagtatcatacctactatgtgcagcactataccgccaagatactgttgggaagatattttatccgcttccgctatttccaaagcacgggaaaaaagagacaccaactcctcattcaaacccacctcaagcacttgattgtctttagacaagaaaccgcctttcaccaaattatcaatgacaggaccttcaaaaccgatataatattcgttccatccggtttggcgataagggtgataagtatgccattgaccgggaaacaataccatcagacgtcctttgcatacctgcttttccggcgttgtttccgaggaaaacaaaccccgtcctttcgtgatataaaccaattgatactcacgcaagacacgtcctttctgggcattaaagaaataaccggaaggatgatccttcaatggatacggagagtccggctgaatggattgaaagccgacagtatttacccacagaccaaacttttggtccatgtcatttacgataaggtacttaaattccactcctaaatcattgtaattcttagtcataccacgtgtccttcatgatgggttcgggacaaaaataggaaatatttgtgaaataagagatacctatggaagatttaataaaaaaagtcccgtctggaagtatctttgtgtttccagacgggattaacatactatctaaaaggattattactttttgactacaattttatcgtattgctgttcagccttaatctctgtatacttcggcgcatccatcatttcaatcaatgcgcggagaacaggtccttcacccatcggatcattctcttgggtaggacggttgtagtagtatgcaggcgacggcatgatacccgttccaacacagattttggtcacatcgcctttgtcggacatcagtgtcatcattcctttcagcccctgctcggcagcataaatgaaatcaggatgcagccaaccatgctttacaccacgtgcgataccaaaaacaaacatggccgtacccgtaatttcctcataggaatcttccttatcaagaagctgatgccaaagaccgttcttaccctgataacgcactacaccgctacattgacggcggaagcactccaaaacctcaggacgcataggatgattctgcggcatcactgcaagcaaatcggcagttgccatgaaaacccaaccgttggcacggctccaatgagcaacaccgtgctcgtccgtatccgtatgatagcaatgatagagaatccgtttttcaggacaccacaaatatttgtgatatttgattacctgattggcagcatcattgatataactcatgtcaccggtcatcttagccatacgtgcaaggaaagagatagccatgaaagcatcatcagcccagatggtattttcatgaggccagatacgggcaatagtaccgtcagccaaacgaggctcgccatagttcaagtgctcggctgtttcattaatataattcaagaaagaattattcggatgcttcatctgcaggtcaatcaggctggctcccatagggccgttatcatccaaacgctttccacggaatatcatgtgccaactcaatttacgaacgccataccatccttcatttttcattgcctgctcatactgcttcttaaagaagtcaagattaccctcgttaaatacgaaattcatatttttaagaacataatcatcatacttcttcgctcccgttttatcggccaattccattaaagcgatatgggttactccattggtataatgccaattattgtatttacatgcaaccttgacattcatatccaaaggcaagttcttgacagacttataggttttaccggtcttggtattcttaaactcataagtagtggtagcaaggatacgatctgctattttcacagcaaggtcagaagccgaaagcttagcttcagctgccgttttcattggtgtctgcgaaaaagcagtgacagctgttaaaaacagcacacatgaaataatagttttcttcatggtaattcaaattataattaaaaagctttacgatacaaagtctcaatatcttcgacagaagtaggacgaggattaccgcccgtgcaaacgtcattgaaggcatcaacagccaattgatgcaagtcttcctcttttacatttatctcatgtagcttttgaggaatgccaatgctcaatgacagcttccggactgcatccacagccgcacgcactccttctgcctcggtcatacccaccgtatctactcccatagctttagctatatgaagatatttgggggcagccggagactctgcattatattccatcacatagggcaacagcaatgcattggcaactccatgcggagtatcataatgagcacccaacggatgcgccatggaatgaacaatacccaaacctacattactgaatcccataccggcaatgtactgagcctgtgacatcgcttcgcgagctgcgacatcattgccatcgtctaccgcagctttcagattagcggcaatcatttcgatggctttcaactcaaacatatcggacatcgcccaggcgcccggtgttatatagctttcaatggcatgcgtcaaagcgtccattcctgttgcagcagtcagccctttcggcatggaatacatcagttccgggtctacaatcgccacaaccggaatatcattagggtctacgcagaccatcttcttctttgcatcttcatcaattatcacataattgatagtgacttcagcggctgttccagccgttgtaggcaatgcaaaagtcgggacagccttatgacgggttgcagctacaccctccaatgatttcacatctgcaaaatccggattattcacaacaatgccgataccttttgccgtatcaatggaagagccaccgcccagcgctacaataaaatcagcaccggatgctttaaaagcggatacgccattctgtacgttcgcaatcgtcggatttgcctttacatcactgaaaagctcataaggaatacgattcttttcaaaaacttcaattattttgtctgcgactttaaaacggatcaggtctttatctgtcacaaagaacgctttcttaaaacctctacgcatggcttccaccgcaattgttttccgacagcctgctccgaagtaagaggtttcgttcaatatcattctgtacatatacttcacttttatttgggtaaattaaaagccacggtcatctctttcatttgttcctgactcattccgtccggttcaaagcccatgtttttagctgcaatgtaaatcagtgcagatttattcaacacatctacctggtcaaaagcagacataatatccacatctacagcaaagactccatgcttttcccacatagctacatcataatcgttcaaagcctcaatagtagcgtcagccaattttaccgaacttggcaattcataagggattatacccaatccacgaggacagaacgcctttgtttccggaatcatactccaaagcagattggtagccacatccttctccaggaacttcttgttatgggtcatagcaatcaattcgataggatgtgtatgcaaggatgctctgtaaggagagcctttttcaagcagataattatgcacggcaagatgagaaggcaattccgatgtaggcattacaggctggtctgctataattacgtagctggcacagtcatccagaatacggatgattgaaccgtttgccataggccaacgtgccaaatcacgcatacgcatctgagtacctttacaataaaaataacaacctttcagataagggagtacctttcctatctgttttacttcgctgatagccggcaaagcccggatttcatcatctacatattcagtgatgtttaaagttatattaccaccattacgttccgcccaacctttttgccaaagataaccggccacttctgccgcttgattgacttcataagccaattcgggacgattttcaagaattgatttcatgtgtctatttaattacagtttattagatattattttcatgcttgcgccatcgccactacaatgatagaagcaatgagaacggccaatcccaatattaatacgcctattgtacgggaaccgcaccccttccattctttcagcaggattccccagacattactgaatgtaacattcagcgacatcagtatactccaggaaaatgcaagcaatatcggactgccgcctaaaaaactcttacccatttccagaccgaagaattgcgaataccataatactccggcaagagcacagaacaaaacattattcacaaggacatcgccgctgaccgacaaatactccttacccgtcctattctttatattttgctggatacaataagccgcattcgtacagaacccgcccaaagttaccagaaagataacaggaagtccggcatacaacggagccaccccacctgccagcgccgcctccttaataggcgttccggcatccaggccgagggcaaaacaggcactcatcacacctgccagcaaagcaaccagcaacccttttgtcaacgcaaaatctttcacggcagcctttttttcctcctcactcatatttctggagcgtaggctgcccgcataaccgataatggcaattcccgccaaagtgatgcaaacaccaataaggagcatcagaccgtcaccgtacagcaaatctttccctgcaaacagagccgggaacagggttccgaaaccggcacaggtacccaaagctatactttgtcctaaagcaacgcccaaatagcgcatactcaatccgaatgtcagaccgccgacaccccaaaggacaccgtaaataatagccggcaatgcaccaccggctccccaaagttctatcaggctgccatcggcaggaatggcaagtaaagcgccgagcagcggaaaaacaagccaggcaaaaatgccctgtaccaaccagaagttttcccaggaccaacctttgactttattgataggtacatacgagctgctctgcccaaagcttcccacagcgataattaataatcctattagtgtattcatgataatcaacggttaatgttctatgagtaatgaaagtagcgggcaaagatatgctttccccgctaaacactatcactaactctgataaacttagttacgtctggatgtaacctcagcttcgtatttttctatttcagcaatgaattcttcacctaccggaacattattcttcaaacagaacatatcccaaacggcattccaaggcaaagctttagcttcttccaacagggcaagacgctggaagccctgaccggcagcctcatactcgcgaagtttagccaacggttccagcaatgcccgcaacatacatttctgtgcggcacgggtaccgatgacataagcgcctatacggttgatggaagcatcgaaataatcaagaccgatgtgtacacggtccaaggcattgcaacggacaatctcctggaagagttcgagagtcgggtcatccataatagtcacatggtcggaatcccaacgtatcggacgacttacatgaagcatcagttcgggtacgaacagcaacatggacgaaactttatcagcagcactctccgtaggatggaagtgacccgtatcgattgttatcagtttctggtgttgcacgctataacctacacagaattcattagagcccactgtatagctttccagaccgataccgaatactttagattccagacagtccttcatatttttatattccgtagcaaaaatccggtcgagagagtctttaaacagttcacggtatttcatacggtttaccgtaacatccttgctaccgtcgtgtacccaaagattcatgatgcaaggatcgccctgacggcgtcccatctcttccgcaatggcacggcagcgcttggtatgttcaatccagaaatcacggatgcctttatccggattggctaaagacaagttaccgcttttaggatgtgagaaagaagtcgagttgaaatccagtttcatcccgttttcagccgcccattgcatccagctttcaaaatgtttcacttccacctggtcacggtcaacaaacgtaccgccgaaatcaccgtaaatttcatgcagattcaagcgatgtttgcccggtatataagaagcggcctttaagatgtcgctacgcaattcttccatattacgggccttaccgggataattacctgtagtctggataccgccggtcagcgagctgcccgactcaaagccgataacatcatcggcctgccagcagtgcatggagattgcaaccttctggagctgttccattaccttttccacatctatcccaagagcagcataacgttcctttgccacttcataagcctttgttattaattcttctttcatgatactgatttatttaatatgattttaaacattaatgattcattgtcacctgtttgaagtgtaaatatgcggcatcccacacgtccgtatcttccggatagaaagtttccaaagaaatagagcgattgatcaactggcgcatggaagcaatatcctttgccgttcccgccgccaatgcctgaatcatgatattaccgattgccgtagcctcagacgggcctgccacaacagaaataccgacagcattggctgtccaacggttcaataattcattacggcttcctccgccaataacgtgaagtgtctctatcgggtgaggagaaagagtgcgaagattatccaaaacctgacgatagcgcagagcaaggctctcaaagatacaacgtacaatttgcccccgtgtctgcggaacaggctgatgagaatccgaacagaacgtctgtatagcctgttccatatcggcaggattagcaaacaggacatcatcaggattaatcagactgcggaacggctcactggcattcgcttcggctatcagttccggataagatgtctgtccccacgccgcacggcagcgttccaacagccacatcccacaaatatttttcaatagacggatagtgtcatccacaccgccttcattcgtaaaattcaaagattcggtttcctctgtaataaccggccccttcgtttccactcccattaaagaccaggttccgctgctcagataggcaaaatcaggattcattgcaggaaccgaagccacagcagaagccgtatcatgcccggcaactgcgattacaggtatatctcccaatccggtcatgcgctgtacttcctttgtcaatgttcctattttctcaccgggataaacaaaacggccgaaattactttccgtcagtccgagttcgcgcaataaagcatcttccggtttacgggtgtttgcattgaccaactgcgccgtactggcaatggtatattccgttaccatttcaccggtcagcatataactcaaagcatccggtataaaaagcaatttatcggcagcggccaatgcactgtcattattacgtctcaatgtatcaagctggaacaaagagttgaaattcatcacttgaatacccgtccactcatagacctgcttgcgggcaacctttttaaagaaagcctcaggcgctccggctgtatgaggatcacggtacgaataaggctgacgaagaaatccgccgtctttacctacacagacaaaatccactccccatgtatcaataccgatggaagtaatttccacatccttcttctgagcgactattttcagtccttcgataatatgccggtaaagctcatatatatcccaataaaaatgtccgccggtttcaatcagatgattcgggaaccgattcacatcttccatttccaatccttccggtgtgaaagttcccaagatggtacggccgctggtagctcccaaatcgaccgcaaaaaaacattgtttcatggtaattagttttagtcgctatttcatgatacaaaaataggggaatcatcccctattccttgtacttattttgactgaaagggtgtcagatttgacaatccgtttcatccgctattaccacatccggtcttctatttcacatcctcacaaaaacgggtgacaatttgctcgccttccgtattccggatggttacgttcttcatcgtaacggccttgctataaacaaattcggctcccaatcgggaagttatatcaacatcttccaaaaccacattttcaatcggcatttccgggataccgttgaagaacaatgcacgacgggcgcctgcgcataccaaattcttcacatgaatattccggaaacaaggagttgtttcatccacaggaagaggctctactttagccggaactttttcaccgctctccaacacttcaacggcagattttccaccataataaagattgaaagtaatcggttcggtcggaatatccatcatagacacattggtaatccatatattttcaacaataccgccacgaccacgcttgctcttaaaacgcagtcccacatccgttcccaggaactggcaattgctgacggatacattacgtaccccgccactcatctcactgccgacaacgaaacctccatgacctttaaataccgtacagccatctaccactacattttcgcaaggacgtgcacgacggcggccatcttcatccttaccgcttttcagacagattccgtcatcccccacatcaaaggtagaattcacaatcagcgcgtttttacaagattccaaatccagcccgtcaccgttctgcgcatagctcggattacgcacctgcacatcttcaaccagcacattctcacacatcagcggatgcaggttccatgccggagagttctggaaaatcaccccttgcaaccacacattcttacactctatcagactcaccatcaccggacgaaggaaatgacggacactttgccactcttcttccgttttcagattctgggggacattcatattgctgatagtatcccctttcaaagtttcaggataagggaaccagtaggtaggacgtttatatacaccgccacgggctgttgtctgcttccagacgctctccgtaaccttctcacgcttcaacggacgccagtaatggccgtttccgtcaattgccccttcgccggttatagctacattttccaggttacggccggaaatcggagactggcaacgacgggtatccaacccctcaaatactgtttccaccaaaggatagaggtccacatcaggagagaaaaggataacagcccctttttccaaatgcaagtcaatattgcttttcaatacgattggtcctgtaagccaaacaccggcaggaacaacaagatgccctcccccttgttcggaaagggcattgattgcatcggcaaaagccgatgtacatagagtttccccattaccgacggcattaaactctttcagattgaccgtacggtcgggaaatctcggcgcttccacacgaggcatgtcaaaaggcaggttacgatagacagcttcatacttatagtccgcagactggcaagaactgaatatccataaacaaacagcagcaattacatacaatggttttgtcattcttaatagcgttttaaagttagcaaacataccggaacatcttattccgatacatgtattaattatctcctaaataataagacggtacgggtgcttgaggataccccatgctacgatgagccacataactacggtacaaagcgtcctgcatcaacgttaccctacggtctgtcgcaggaatatcggtgcggtaaatacgcagttcgccgggcaaagccgttatcagttcctcacgccagtcaccttccatatcagccatcagtaatatatcccccttgatattttccgtcaatatctcacctttccatttccagatactctgactacgtccaccggaagaggagcctgctccccaacggttatcgtctcccttaaatgtctcacgcaacaaatcagcatcccaccatatccagttacggcagccgggaatctcatcttgagctacttgcagtttcttcccgttggcagtaagcaaatatctgtcggtacttccccccttacggtcttcgctggcaaaacactccaaaccgggatgagcaggatcaaaatccgttaccataccgtcacctacatgataagtagtatgaccgatgctccatatcaatttacccgtagccgcatccactactgaaacaccacggccatcttcctttttgggttcacttaccataaacacctgcataccttccctatcgggatgcaacttgcaaagatatgccttgtcgctatgtcccaagcccgaagaccacaaaagtgttccgttatcatcaagcatacaggaacctaacataacctcatcacggccgtcaccgtccacatcggcagtaaccatgctgtgcgcacccatactacggacaacaggattctcctcatcaccgtcccaacgccatgcacgttccaatttaccgtttttcaacatccaggcatccacaaccatcagcttgtaagtgccgcgtgccgccaatataaacggggtctttccgtctaaataggcaactcccatctggttacgattctgacgaatcagatttccgtaacggtcattgcgctcaggccaatccacccggtctatctcctgtccggtcatgccgtccaatacggaaagatattcactcccgccgcaaacacgtcctttctcgtttttcacatagtcagtgcctgctgttttaatcgccacctcagccttaccgtcaccattgaaatcgtatacgatgaaaggcgagtaccagatacccggttcaatccccggtcccatatcgtatgtccataggtaagtaccgtcactcaaataagcggatattttatacgtttttccggtagtatcacccggcatgcccggatctacgttcgtttcaggagtacggacgatataatcataagttccgtccccgttcaggtcggccaatgctatctttcctgcttttgcattatctttcaagcggatagatgtataaggcttcaaatcggataacacgaccttccgttttttcgatacaaccggcttctgtcctttgacaacagcttccacccaatagacggcttgtgcatgaggagcggtgtccacaaagtcacaagtacgggaaacggcctttttcgtcaggcggcaagcctttccgcccacctcacgatatacatggaaagccgtggcgggagcatccgatgccagcaaacgccagctgagatacacggatttgccgtcccgggaaggggcaaccgccagtccgcgatttaaattttcagtaatccgctcttgggcaaatccctctaccaacggtttcggttcatgcttaggatcaaggatttcatagaaatagtttcgttcacgcgggtcttgagcatataaggagcagaaagcgcaaacaagcgctactccgcccagactgatttttttcattgcatttcgtttttagttatcttcagtggtataatacgtacagggcctaataatccgcttggcacaggttcccaaccggcataagtcccttttttataaccaagcgctgcaatatttatatctttgaagatgcgccacttcactccacggcgatccatatcggctatgcgattggcaggtagattggttacttctatttccaaagtattctttcccggacacaggtattgcccgacggagcaacaatagggcacagcccataaagtggcaacattccggccattgatacgtacacgggcactttcacggacatcgccaagtgagagtaaccagtcctgggccgaggccggattttcaatcacaaaagtggttgtataacagcctgttcccatcgtcgttttagcaccttcaaaggataaatccgtccatgagcccaaagcaacggaatccggcacactatgtaccgcaggagcgctttccacaaaccgcaggttccataagccggacagttcgacagctccccgtgcagcagtctgatacttccattccggagcttgtacgtcagcttccgtaaaagttttcaatatggcagattctccggaggccaattgcaaataaacttccgtctttccatccttctgacgcaaacgagccttgccggaaacaccgttcatcggattataaagcatggccgaacgtgcaggcacagccaacggtatccaactttccgtatcttttccggtcagtgcggaaatgaaataatgataaccttccgggttcttccgacggatacaactcaaatcaaaagaagttttcatcgcttccggtatagcagcagtctgcgccagtgtacggacataatccgtaccgaagaacaccgtcttacctttaccttgcttatttcctaatttctttacctgctccagagtacccttaaagtccgtacggcgctgttccaacctggcataccccggaacatcctccggataccggtccagaaacacaacagtcgccccctctcttgccaattcgagcaggcgggcaagtacgtccgcaggcattaaacgtgcaccgggaacaaccaatgctttataagctgttccgcctgacgtcacaattttcttatcacggcaggtggccgtacgaatgaagttatcggaaatataatccatatcataaccggcatcgttaatgcggtgcaccgcttctataaaacccggagcacgccgtgccattttatgaatatcaaacatcagcagacgtccgtcctgctcctgccacatatcatataccggcaaatacacaaggaagtcattatccggctgtcccatctgcaaaaaactctggcaacgggatatgtattgaaagaaagcaggcgcatcacgccagatgctgttcgtcggactcatatccaccgtagcataaaacttccagccgggccaggcagcctcagcaggagaataagtcgtaccatggaaaaaagtatgattgacgccggaaacgaacatgaggtcgatatccggcttgcactgtgacagagaagtgcggaaatgttccgtcagccaagtaaaagtttctgaagaagtataaggtttaccggcaatatgagcgcccgaagatgcgtatttcaacatggagaggtcggaatcattgggacgcgtcagcgaatccttacgcaatccccgtataccgaaatcagacaaaccgaaaccttcgcactccggaatatccactgtggcataaaggtctatcagatttcccggcgagccatgagcctgatttctggttttagccccgtgccgatgtgcccactccgtccactgacgggtgaaattctcctgcaacagttcaccgagagtttcacgataatcggagatgatgcgccgggtcttgtccgaacgctcccctgccgccagaaactccggcaggtgttcttccagtttataaccgcgacgcgccagaaactcatcaaaaagttcttccgaccagtccgccccgtaaacctcataggagtcgttaaagaaattatggggataagctgtagcaccacctgccgtatccttgaactttccgtcaaaagcgcattcaaagcgtccgagatagtttttcacggcacgggccgagaaatgattcatcacatacccctcaccgccgggtgccgcacgcttcaccttctgcaaagtcttgccgcaaaaggcggcaatcaaacgccagctccctttcggagctttccagcataacattccgtcttttaccttatccgtcaaatccagacacttccccgtatcggaaaaggccatcagacgctccagtttggcataaggcttttgttttttatcggcaacctctattctctgatcaagcgtattcccgccttctaaccgatattccgtaacaaacagtttgcaggcggcatcctctatccccacttcagggcctccgaaaggccagccggtaccggtgttcatatcaatctgcatgcccagacgggacgcttcactttccgtatattgcagcatctgcatccatcggggggagagaaacggaatatccttcgcatcatttccctgtacgccataaatcggagtaatctccatcgtacccattcccgccgcagcatatgcttccagattacgggtcaggttttccttatccaccgcacttcccatccaccaccagcgtgcagccggtttggcatccaaaccaatctccggccacgaaacatcttgtgcagacaaaaaacctgcacaaaatgcaaacatggcaatacaaaacaatcgattcatacctattttattttctccagttccagacatcccataatgaacggtcccgttgctttggcgtcattatccctcatcttttcacctatgtaatattcaaaacttccgtcgcgatacggatgaccacccaaaccgccaacctggcaacaacgggtcagagtcagcgttccgtcctgtttctccaccagcaatttatctttcaagccctgcagagccttttccgctacagcgcggtatctggcatcgatatatcctttattcactgcttttgcataagcatacatacattgggtagtcacggatgcctcagggaaattacccttgcgtttaggttggtcgataacctgataccaaagtcccgccttatcctgatatttcggcaatgtctccgccaatccgcggatatagccaatcatgtcggcacgtcccggatgattttcgggtatataatccaaggcatctaccagcgccataaaccaccagcctatactgcgcccccagaagttgggagaatgtccggtttccgggttcgcccaacgctggctcttgctttcgtcccacgcatgatgatacagtcctgtcttggcatcataggtatgtttatgacagagacggaactgcttcaccgcctcatcaatccattccggtttattgaattccgcaccatactgcgccataaacggagaagccatatacagtccgtccagccacatctgatgctgataaatcagtttatgccagaatccgccttccaaagtacggggctggttcttcaactgtttgataaggatatccattgccgctttatatcgttggtcgccggtttcacggtaaaggtcaaacagcacctttccggagttaatgaaatccaggttataagtggacttatcatacagatgaatttcccccttttcattaatcagagagtcggcccattgcttcacataatcataataacgacgttcgcccgttgtcttccacatctgcaacatggcgcagcaacccactccctgggcataaccgaagaacagacgcttgccgtgatccaaccggtaagcctgcgggaaacgcatcatctcggagtcggcaaaccaacgcgcatacgagccttgttcccatgtatccgtacggaaaggcactgcgggcaaacccgacttattataaagatttacacggaagaagttacaaaagccgtaacgtacggcaaccggctccgccacctgcggagcgaaaacttccagccggctgccttttatcacagccaccgccggatagaaacgccggtcggctcccgcaaccagaaagcccttgaccggagcattctcaggtgtcatcaaaccatcttcggcatattcaaaactcaatatagccttattgccgctgactttcatcgttttgaagagcgggccggagtatgccacatccttcccatattgtttggcaagcgcccacaaagccatgcgttcacccgccacgcgcttattacgcggatgaatatccgtagaatccgccgcatccgtaacaaccgccatgcccacattcttcagcccgctttgccatgttttgagctgtgcttcacgaataccggccggctgtcctttatgcggagcaatctgcatgaaatagaacggcatgtcgggttgcttccattctttccgccaactgttaatcatattggtgaatacctgctgatatttttcatgacgaatagcattcgattctccctgataccagatatttcctttcaccgtatatcccagaataggatgaatcataccgttccaaagcgtagcggggaccttgcaatatcccttctcctgcttcacattcttcaaagcaaaatcttcaagtacatctgcatagagcggattgttcttcataacgctcatcttcgtccacgattccgcatgcgtgcctccccatgtagactgtatcatacctaccggcacattcaattccttatgcaaccggcgtccgaaaacgaatcccacagccgagaagtcatacaggtttttcggcgtgcacaccagccaccggccttgacagtcatccatttcaccgtcgggagccaactgatgttccacccggaacagacgaagttccggataatccgcgtccttcatctcctcggcttccgttatcataccggtcatccattttttatcgggatgcttgcaaaccggatattccatattggattgtccggtacagagccatacttcacctaccagtacattattaatagtaatcgtattctcaccgctcaccgtaacagactgcccttttgcagccgcaggcgttttcagcttcacagcccatttgccgtcagccgcagccttggttgttacggttttatccgtccatgacgcttttaccgaaacccgttcaccaggcgttgcctttccccacagattgacttgcgcgttttgctgcaataccatattatcggaaaagatagccggaagtaccactttggcagaaacggaacctgccaatactaaaagaaaggaaattaatccaagtagttttttcatgtgcctttgatagttttaatagaattaagaaatgaactttattctgtattgcaaaaataagagcttcacggcaaacggactctgagccttttggcagttctcttattgtttttgtcgtttatcaccaactccaccccgcccaagacacggttatacttgccgtttctcttacggcagccaggaacaaaccgcacgcagacagcttgcacttaccccacactgagtttttcaggctacctgtctgaagttgtcgcaaagatataattaaaagatttccgataaaaggcttttaattatattccaaacctgcatacatataccgtcttttttacgttttttgcatattaaagaataaaaaaatcccatttctgtatattctttccaaaatattccctacttttgcaccaacctaagaataattatacagaaacatgaaaaagaaagccaatcggttagatgccatcaagatgattatctcaagcaaagacatcagttctcaggaagagctgttgcaggctttgggcaaagagggctttgagctgacacaagccaccttatcacgcgacttgaaacagttgaaagtagccaaagcggccaacatgaacgggaaatatgtatatgttcttcccaacaacatcatgtacaagcgcagcaacgaccaaagcgcaagcgaaatgctgatgaccagcggcttcatttccctccatttctccaagaacattgccgtcatccgcacccggcccggctatgccagcagcatggcttatgacatcgacaaccgcgaatgtcccgccgtactgggcaccattgccggcgacgatacgatcatgatggttctgcacgaggctgcatcccacgaagaggtgcgtatgtttctgtcacaaatcattcctaacataaagtaaacctgtacaactatattacaacgaatatataacgaaataaaagaaatggattcgaaacagattgatgtgatggtggccgacgcctcacatgaagtttacgtggataagattttggataccatccgagaagctgccaaggtgcgcggaacgggcatcgcagaacgcacacacgaatatgtggcgactaaaatgaaagaaggaaaagctatcatagctttatgtggagacgaatttgcaggtttcacctacatagaaagctggggaaacaagcagtatgtggcaacatcgggcctcatcgtacatcccgattaccgcggcttgggactggccaaacgtatcaagacggcttctttccgcctggcacgcctgcggtggcccaaagccaagatattcagtctgaccagcggagcggccgttatgaaaatgaataccgaattgggctacgtaccggttactttcaatgaactgacagacgacgaggctttctggaaaggctgcgagggctgtatcaaccatgacatactggtagccaaaaaccggaagttctgcatttgcacggcaatgctttacgacccgaagttacacgaggaagataaaatataattaattatagattttgaattatgaatgggaacacacagactcgtttacaagcctgattcccaatttataattcaacattcaaaattcataagtattatggaaaagaagaaaaaagtagtagttgcattcagcggtggtctggacacctcattcacagttatgtatctggccaaagagaaaggatacgaggtatatgcggcttgtgccaataccggcggtttcagccccgaacagctgaagacaaacgaagagaacgcctacaaactgggtgctgtaaaatatattactttggacgtaacgcaggaatattacgaaaagagcttgaaatacatggtattcggcaacgtattgcgtaacggtacttatcctatttccgtaagctccgaacgtatattccaggcgctggccattgcacgctacgccaacgaaatcggcgcagacgccattgcacatggttcgaccggtgcgggtaacgaccagattcgtttcgacatgactttccttgtcatggctccgggcgtggaaatcatcacgctgacacgcgacatggctttgagccgccaggaagagatagattatctgaacaagcacggctttgcagccgacttcgccaaactgaaatattcctataacgtaggtctgtggggtacttccatttgcggcggtgagattctggactccgcacagggacttcccgaaagcgcctatctgaaacattgcaccaaagaaggcagcgaacagttgcgcctgaccttcgagaagggtgagcttaaagcggtcaacgatgaaaaattcgacgaccccatcaaggctatccagaaggtagaggaaatcggtgcggcttacggcatcggccgtgatatgcacgtaggcgatacgattatcggcatcaaggggcgtgtaggtttcgaggcagccgctcccatgctgattatcggcgcacacaagttccttgagaaatacacattaagcaaatggcagcaatactggaaagaccaggtagccaactggtacggtatgttcctgcacgaaagccagtatctggaaccggtaatgcgcgacatcgaagccatgctggagtcttcgcaacgcaatgtaaacggtactgcgattctcgaacttcatccgctctgtttctctaccgtaggcgtggaaagcgacgacgaccttgtaaagaacaaattcggcgaatacggtgaaatgcagaaaggctggacagcggaagacgccaaaggtttcatcaaggtaacttctaccgcactgcgtgcctattactcaaaccacaaagacgaagaaatctaaatgatgaaccgaaagcaaaaattaacgcgcccccgaaacggaagaatgctttccggcgtatgtgcaggactggcaaactttttcggactcgacgtgtcactggtacgcatcatctacgtttttgctacgatcttcactgcgtttgcaggtacgcttatatatatcatactattagttataataccagaagaacccaatagatattaccaacatgattaaagtaggaatcatcggcggagccggatacacggcaggcgaactgatacgcctgttactgaaccatcccgaagcggaaatcgtattcgtaaacagctcgagcaatgccggcaacaaaataaccgacgtacacgaagggttgtacggagagacggatttaacgtttaccgacgcacttccgttggacgaaatcgatgtacttttcttctgcacggcgcatggcgacaccagaaaattcatggaaagccacaacgtaccggaagacctgaagataatcgacctctccatggactatcgcatcaagagcgacgaccatgacttcatctacggccttcccgagctgaaccgccgtgccacctgcacggcaaagcatgttgccaaccccggctgcttcgccacctgtatccagttgggcctgcttccgcttgccaagcatctgatgctgaacggcgatattatggtgaatgccatcaccggcagtaccggtgcaggcgtcaagccgggagctacgagccacttcagctggcgcaacaacaacctgagtgtgtacaaggctttcgagcaccagcacgtgcccgaaatcaagcaatcgctcaaacagctccagaacagtttcgattcggacatcgatttcatcccctatcgtggtgattttccccgcggcatctttaccactatcgtgataaagaccaaagtggcattggaagagattgtccgcatgtatgaagagtattatgccaaagactccttcacgcatatcgtcggcaagaacatcgatttgaagcaggttgtcaacaccaacaaatgccttatccatttggaaaagcatggcgacaagctccttatcatctcctgcatagacaacctgctgaaaggagccagcggacaggccgtacacaacatgaacctgatgttcaatctggaagagactgtcggtttgagactgaaacccagtgctttctaaagtatctttaatttgtaatcagttactgaaagaatgaaactattcgatgtatatcccctttttgacatcaatattgtcaaaggaaaaggctgccatgtatgggacgataaaggtacggagtacctcgacctctatggcggtcatgcagtaatctctatcggacatgcacatccgcactatgtagagatgctcggcaagcaagtagccacgcttggattctattccaactccgttatcaacgaactgcaacagcaactggcagaacggttgggaaaggtctgcggatacaatgattattcccttttccttatcaacagcggagccgaagccaacgaaaacgcgttgaagctcgcttcgttccataacggacgaactcgcgtggtatccttctcgaaagctttccacggacgtacttcattggcggtagaggcaaccgacaatcccaaaatcattgctcccatcaacaactgcggacacgttacctatctcccgctgaatgatacagaggcgatgaaagccgaactggcgaaaggcgatgtatgcgctgtaatcatcgaaggcattcagggagtgggcggcatacagttgcccaccgacgagtttatgcaagccttgcgcaaggcctgtacagagcacaatacggtactgattctggacgaaatccaaagcggttacggacgtagcggcaagttcttcgcccatcagtacaacggtatcaaggccgacatcatcaccgtagccaaaggcataggcaacggattcccgatggcgggcgtacttatcagtccgatgtttactcctgtttacggccagctcggaaccactttcggcggaaatcatctggcttgcagcgctgcgcttgccgtactggatgtcatagagcaggaagctcttgtagagaatgccgcccaagtaggcgcatacctgatggaagagctgaagaaattcccgcaaatcaaggaagtgcgcggacgcggactgatgattggtctcgaatttgaagagcctgtcaaagaactgcgtttgaggttactgaaagaacagcatgtatttaccggtgtcagcggcacgaacgtactccgcctgttgccgcccctgtgtctcggcatggacgaagcgaacctcttcctggaacgttttaagaaagcactttgacaatttacggataatcagccggcaaaagatacgaccgaaagaagaataccttcctgtttcggtcgttttttcattaaaatctttacctttgcccgaagacaactttttaaatgacaagatgatatgaaaacagcaattatcggtgcaggaaatatgggcggctccatcgcccgcggtctggcaaaaggaaccatcatccccgccagcgacatcattgtttctaatcccacgcaaggcaaactggatgcgttaaaggctgagttccccgctttgcaaaccacacgcgacaatcaggaagccgttaccggcgccgagctcatcatactcgccgtcaaaccgtggctgataaaaccggtggtaagcgaactcaagctgaaaagcaagcagatacttatctccgtagctgccggcatccctttcgaagaactggcacactacgtggcagacaaggagatgaccatgttccgcctcatccccaacaccgccatcagcgagatggaaagcatgacgctcattgcaagccgtaacgccagcaaggaacaggaacagcttttgctcgacatcttcaaccagatgggacttgccatgctgattcccgaagataagatagcggcaaccaccgccatgacttcctgcggcatcgcttatgtactgaagtatatccaggcagccatgcaggccggaatagaactgggcgtttaccccaaggacggcatgcgcatgatagcccagtcggtaaaaggcgccgccgaactgattctgaacaacgacacgcatcccgccatagagattgataaggtatgcactcccggcggaattacaatcaagggtatcaacgaactggaacatcaaggattctcttccgccattatcaatgccatcaaagcaagtaaataaccgtactaatccacttaataaaaaccacatggacgaacagattaaacaaatagccgaacgcctgcgcggactgcgcgacgtattggaattgaatgccgaagacatcgcccgcgattgcgacatcccggcagaagagtaccgtcttgccgaaacgggagaattcgacatctccgtaagcatgctgcaaaagatagcccgccgttacggcatcgcactggatgccctgatgttcggtgaagagccgaagatgagcagctacttccttacccgtgccggcaagggaaccagcatcgagcgtacaaaagcctataaataccagtcactggctgccggcttcatgaaccgcaacgccgacccgttcatcgtcaccgtcgaacccaagccggataacgagccgatacactacaacagtcactccggacaggaattcaaccttgtactggaaggccgcatgatgctgagcatcgacggcaaagacttgattttaaacgaaggagacagtttgtatttcaactccaaactgcctcacggcatgaaagcgctggacggaaagaaagtacgtttccttgctgtaatcatgtaacaacacataaatgaagaacggtgaatgaagaaattccaaaagttatggtagaaagatttttatcgcaaacgtcctttacatctcaagaggacttcatcaagaatttaaagattaacgtaccggagaatttcaatttcggttatgacgtagtggatgcctgggcggccgaacatcccgacaagcccgcactgctctggaccaatgacaagggcgagcacatccagttctcatttgccgacatgaaacgctatacggacatgacggcttcctatttccagagcctcggcatcggccacggcgatatggtaatgctcattctgaaacgccgctatgagttctggttcagcatcatcgcactgcataagctgggagccgtcgttatccccgccacacacctgcttaccaagaaagatattgtataccgctgcaatgccgcagacatcaagatgattgtctgtgccggcgaaagcgtcattaccgaccacatcacggctgccatgcccgactctccgagtgtgaagaagctggtcagcgtaggcccggagatagccgaaggttttgaggacttccacaaaggcattgccgatgccgcccctttcgcacgaccggagcatcccaacagcaacgacgatatttctttgatgtacttcaccagcggcactaccggcgaacccaaaatggtggcgcacgacttcacgtatccgttggggcacatcgttaccggaagtttctggcacaacctgcacgaaaacagcctgcacctcaccattgccgatacgggctggggtaaagccgtatggggcaaactgtacggacaatggatagccggagccaacatctttgtatacgaccacgagaaattcactcctgccgatattctgacaaagatacaggactatcacgtcacctcgctttgtgcaccgcctaccatcttccggttcctgattcacgaagacctgacgaagtacgacctctcttcattgcagtattgcaccattgccggagaagcgttgaaccccgccgtattcgatacattcaagaaactgacaggcatcagcctcatggaaggtttcggacagaccgaaaccacccttaccgtagccaccatgccgtggatgcaacccaagccgggcagcatgggattgcccaatccccaatacgacgtagacctgatagaccatgacggccgttcggtagaggccggtgaacaaggacagattgtaatccgtaccgacaaaggcaagccgctcggtctgttcaaggaatattaccgcgacgccaaccgcacccgcgaagcatggcacgacaacatctattacaccggcgacgttgcctggaaggacgaggacggctacctctggtttgtaggccgcgccgacgacgttatcaagagcagcggttaccgcatcggcccgttcgaagtggaaagcgccctgatgacgcatcccgcagttatagaatgtgccatcaccggagttcccgatgaaatacggggacaagtggtgaaagccaccatcgtactgtccaaagactataagaaccgcgccggcgaggagctggtcaaggagttgcagaaccacgtaaagaaagtgaccgctccttacaaatacccccgtgtcatagagttcgttgacgaacttcccaagaccatcagcggtaagatacgccgtgtggaaatccggaagaacgacgagaaataaccgcttcggaataagcagaagcatagatggcttgtaaaagagacagcggttgtatcaaaatgatgactgacgtattatctgtcattctataattgatacaaccgctgtcctgttctttggcatgaagactaccgcttccgtactatatcctgcaaactcttctctgccgacgaccacacattctcggccaatgccgccatacgaggaaagagcgagaactccgtttccatgtaacaggaatataccctgtccataagcaccccggataagttcagtccgtcgaatagtcaacgaataaggaagccaccggaaattccactgttattccgattgaccagcatatttcttgaataacatagatgacgaattattaaccttgcaaatataagattttcatgcaaataaaaagataaaaggattatatttgcacaagattcagagaacgccacgacatcatgaatagtaaaatgcggaccggaagagatatgattctcttaatgattatactgtttctgtccaataatatatgcgcacaagatgcttatatccaccgtctcggcattgaaggccgggcgggatatattttccccaccagctcctttctgcggggtgaaaacgatatgcgcaaaataatgaggtctgcttgctccgcccacttgaagtactcattccggctgccaccgggtactgccgccgaccggatatacggaagttcctatcagggaataggattgggctatttcgatttcggcaaccgcagggaaatgggaactcccgttgccctctacgccttccaaggcgcccgcatcgccggaatcactccccgcttgtcgcttaactacgaatgggggttcggcgcatcttttggctggaagccgtatgactatctcagcaatcccaacaatactgtaatgggaagcaaagtaaacgcctatctcagcgcaggcattcacctgaactggatactttccccgcggttcgacctcaatatcggcgcaacggcagtacatttctccaacggtaatacccggtaccccaacaccggactgaacacgatagattttaaaatcggagtggcatataatttcaaccaggacattgacaagaccttgcaaccgttgcagcaaattccggttccggcattcccccggcatgtcagctatgaccttatgctgttcggttcgtggagacggaaagccgtagacgttcccggcggacaagtccccgctcccggcaaatacggcgtagccgggttctgtttcgctccgatgtataacttcggatataaattccgtgcaggagtatccctggacggtgtctatgatgccagcgccaacatttatacaaaggattacgctacccaactcgatggtgccagcgaggaaaaggcattcggcactcccccgcttcgcaaacaactctctctgggtgtctcggcacgcggagaatgggtaatgccctactttaccgtcggcataggtttcggagccaatatcctgcatggcgggggcgacttgcaatcattctaccaaatcctggcgctcaaaatagatatgacccgcgacacattcctgcatgtcggctacaacctgaaggatttccacgagcccaactatctgatgctgggtatagggtatcggtttaataacaggcgtccccgacttcacatcggtttcccactttaggaaaggtggtaggaatgcagtccggagaatggctggatgtagcaggctatgaactgatattgaaataaagaaaactgttttttggtcgtcactcgtcacctattgcccgtatccctttaccagagggcgatacagaggtgacgagaagtgtgacgaccggtgacgagaaactatcggtcatcactaaaatatccgcttcttcagcatttcatcttctataactatttaattatctgtcactttacccaataatacacatctcatcatattttgcggcattctgcccatattaaggggaaaaaagtaccccaaccccttacatttcaccccaaaatgcacaaggaaaatacactttctccctgttatttttctaacgttacaccctatattatgtcatcatggctcttgaaaaattccgttttgcaactgcgaaccatacggtttccatctgcgggctgtacagcccgcaattggcaaccgtggagcccgcaattgcaaaacgaggtttttgctgatatacagctgcatttacaacgctcctttacgacataatacactatggacaacgatatttcttacaggggattccaactgaaacagctaacgtatatactttttcggtttacatcttggtttacatgagcggcataattcaaggtaaaatgc

SEQ ID NO: 459 - DNA, 816830 bp, Bacteroides stercoris
  source 1..816830: mol_type = genomic DNA
aagatatacatcaaattaaatataaaaatctaactaaataagattgagattcaagtgtttttaggtttcaaaagtataatttccaccttaataaaaaagctttccttttaagatagtggaaatcatactcttttagatagttattctttccaactttcaaagtagtacttttggagcagtttatcaatatcgctttggcgatagatgattttaccttttatctagataaaggggattagccctgtatctcgccactcctgcaaggttcgcaaactgacattcagtttcttggaaacttcattgttagaaagaaagcattccccgttcaggtgagacttgtaatgcttgacgatagattcaatgtcgtccagcatcgaatcgagcgaagaaataaattcttggacttgtagggtatctttatttattagttccatgattgaaagattgttttattgaaatattgattgggacaatcatgtgtggccaaaagggtcaaagtcgcgtaacttttccatttgccaccggattgagctctgctgcatagcgggagtccagcaccaaccgacacaatgagcgccaatagccatccccacctttccactcctgtaatgctggtatcacaaatggcttagaattttccgtctttagccctggcacaaacagtatgcaagacactgctcccaataacacacctgccttaaacacctacagcactttaccaaagagaaactgcccaaaaacaaaatagtcattttcacatcatgaaatatccacctcatgtagtttggtacaaaaacatcaatccaagcattatgcttggtaatccatctatccaaagcaaattccatactatttattttaaagtttcagttcactctacaagagtgatttttacaaaagtaactccatgctaagggacttgtgcccaaaattcccctttatactcccctaaatccttttgatgccacaaatcacaaacagaaactttttctgtatttccaaggcctgcatcatagaccatagattattaatttatggtctatgatactttgggggttaggatatatttctcctttaccatcggttttgaccaagaaggaattagtgcaatttccccgcgccctatcagcacaagcaagaaacagccacaccgttaataaacacaaactcactctcatctcaactggtctttattttatcatcggattaacaaacaactcatccatatacacgtgttgcgaagcttcgaaagccaccttcatataacggatgctttcatccaattgatcaaataacaagttttcaatccatgcatcatgccgattgttcgggaaatgaggggtatccttgatagaagccaatctatattcttttccatccaacgaagtgaacagataaactttcagcggcatacctattccatctaaattatagtccagcatacgaagcatgactttccgtagtctggtctttttctgcaaatctaccacaagctcatgataacctttctcgaatttcacccaacgggcatctttactgtcttcctctgcaaccctgccatcaagcaatgccttcaaatccgcttttcccgacaccatgtcaatggtagccccgttagccaatctctccataaaggcagcttcggccaattgccagcagccaatccgccttttccagtccatatagtcattgtatactttatgtgaccacaccggttgccccaactgataagttgacgtgggactttctatgattccacaaaccataaatgagataatcctgtcaacccctgccacagaagcagccacttgttgggataaaaggcgcggataagcggcaggaatcaaggccgaagaacggtcgttggttccctgttcccaagtgaaagtctcacaattggcccacatctcaatattcagacggttgtggatgtctctcaaccgttgccaagtcttctttaagcgaggcaacatgaatttattgcgtacacagcccacttcgtcctgataggctatgatgtcgactttcagctttgccaattgtttctcatactccggattatcaaaatcagacagtccgataccataaggagaaatcagtgtcttcttacccggagtcaatgcatttgccttttgggtcaatgcattaaccgattgtacagcatgttctgcaaaaatggggcaaagacaatcctctaccggcaaataccagccataaaaggctttatgattcttataaaagacagccagttcctccataatttgcaattggcgttgtttgacagcaggatcctgcaaattatcatcctggtcttttgcccatccagtactcataaaaaccttcatgtcatatcgggcagcctcatcaagaatggcttccacaggactctgtttatctttatcataccaccagggcattaattgagagggataataagccttaccctcattggcaacttccatgaataccagatattcaatgcccatagccgacagttcccgcactttagctttccataattccggatccgtattatcaaaactctgcggattggtatatctattacgtacatccttatatgccagatttatccaagtaccagtaatggacttcaccctcaaaacagattccttcaccttctgttttctctgtcggccagaaacatcattgccagcaaaaactactgccgacggcagtacggctgatatcatcaataaccccaacaggattggtagaaaattcctcttcataatatacacatttttttaattaataaaagattaattgccaccggacgtaataattaacgccaaacctaaaaaaaagagaacaaacatcaagacaatcaatagattagtagatttagatcccctttgaattccttccaaataccccccataatgcggcaaccatcgtagccccttgtcccaacccataggaaatggcagcaccggctgttccggcagcaatataactgcacgctgttcccaacgcccaaatggcaccccccaaaaataccaaccaaatgagtattcatatttcctttgaagtattgactgtaagccacaggcacccccgtaaaaggtttcctcattaacaaagagttgaataggaagttactgataaagatacctattgcaaacacaaacaaggcagaatacggagtcatcataccaacagcaggcgattccagattttccaaatccatagcagcggcaacaaaacgatagaaaaacgccatcagaataccagcgcagacagcaatcagaactcctctttttcggacagtctgacctgatacttcagaaactttaccggaagcaatcccattaaaaacaatggccaacacaatcaagaagacacccccaaaaagagtgacaggatcccccttcggtacactgaagtaattgacaaatacgcctaataccaaccccacccctatcgggaaagcaaccgacataccagccaacgacatggaagccgacaacaatatattcgaggcattgaatatgacgccccccagaaaagcgctccaaaaattctccataccaacttgctgcaagtcctgcataaatccgcgtcccccttctccaatgctgcccagtgtcaagccccaaaccaaagaaaaaagaagtataccaatcacataatcccaatagaacaattcatagcgccatgtttgggctgacaatttttgagtatttccccatgatccccagcataacatcgtgacccagcacaacgctaccgccaatccgtaactttcaactataaacataatcgtgatatttaatattgtttttcactactgtcccgtaaaagtggataaatagttctttgaaattattgaaatatagtcaattacacggttttttgaaatgaaacggacttgattttgcaactttgcagtctaatacaaatggctgctatgttccaagacaaatacgtattctctcaattaaccgcttttctgaacaggactcagttcaacaactatgttcgcaagtatgatggcaacagatatgtgaaacatttcacttgctggaatcagatgctcgcgatgatgtttggacaactgagtaaccgtgagagcctgcgagacttagtcgttgctttcgaggcgcatagggccaagcaatatcatcttggtttaggtcgtgaaccgatagccaagacaactcttgcgacagcgaaccagaaccgtgattacagaatcttcgaagactttgcattctatatgatgaaggaagcctgcgagaagcggacgaccaacatccttgacatttccggaaagaaatatgcgtttgattcaacaacgattccgttgtgtcttgcaacattcccatgggcaaagttccgaagcaagaaaggaggggtgaaagctcatgtcttatacgacattgaagcacaagttcctgccttctatactgtaactactgcatcaaagcatgattccacagcaatgtcttcaatccattatgaaccaaatgcttattatatattcgacagggcttatgactcctttaaagaactctataggatacatcttacagactctttctttgttgtcagagccaagacgaacttaaagtataagacagtcagatggaagcgaagaatgccaaagaacataatgacagatgcggaagtgaaactgaccggatatctctccgagaaaaaatatcctgagtcattcagactcgtccgatattacgacgaagaggatgaccgtgagttcacttttttgacgaatgcaaaacaactttctgcactggatgtcgccgatctttataagaaaagatggttaatcgagctgttcttcaaatggctcaagcagcatctcaagataaagaaattctggggcacaacagagaacgctgttcgcatacaaatcagtgtggctattatcacgtactgtcttgtggctattgtccaacatgatatgaagttgaaacgttcaacctatgaagttttacaaattctcagcatatcattgactgacaaaacccacttgcgtgacctgttcgacaagactaatttcaatgatgtcaaagatctaaatgatcccctgattccggggctttttgattaattgtttaactcgtcccattttaacgggacactaatgattgtttttaatgattacaactcttcacggtaaggaatagaagactgggctcccattctggttacagctatggatgaagcttttgaagccatcacagcagcttgtttcaagtccatgccctctgacaatcctacgcacaaagccccattaaacgtatctatctccggcagctgtagtgtcaacaggctccactttgaaagcatctatacgataagaaacgccctcttcccttataagacatcctttcgaacccaaagtgataattacattctttacccccatcgcgcaaatctcttccgccactttctcaacatcggcatcattggcaatctttatgcccgtaagcatctccgcctcgatgcggttcggagtgaccatgtacagatgccggaacaattctttgggaagactgcgggcaggagccggattcagcaccaccttcactcctttcccgaaagcctttctggcagcatactccactgtttgaagcggaatttccaattgcatcaagaggatatctccctcacacatttcctccaacattttatccacatcttgttcgttcaacaacatgttggcaccggatgccactacaatactattctccgcatgatcgtccacgctgatcagagctactccggaagcagaatcttcatcgagagcaatatatcttgtatcaattccttcctttttaaaataaccgacagattgccgacctaatacatcattccccaattttgccataaatatcagattgccgcccaatctctttattgcaacagcctgatttgctccttttccaccctggttcataaagaattcccctcccagaatcgtctcaccgggagcaggcagatgagaagttctcaccaccatgtccacattggaactgccaatcactataatttttttcataacactatatcactactgtcccgtaaaagtggataaatagttctttgaaattattgaaatatagtcaattacacggttttttgaaatgaaacggacttgattttgcaactttgcagtctaatacaaatggctgctatgttccaagacaaatacgtattctctcaattaaccgcttttctgaacaggactcagttcaacaactatgttcgcaagtatgatggcaacagatatgtgaaacatttcacttgctggaatcagatgctcgcgatgatgtttggacaactgagtaaccgtgagagcctgcgagacttagtcgttgctttcgaggcgcatagggccaagcaatatcatcttggtttaggtcgtgaaccgatagccaagacaactcttgcgacagcgaaccagaaccgtgattacagaatcttcgaagactttgcattctatatgatgaaggaagcctgcgagaagcggacgaccaacatccttgacatttccggaaagaaatatgcgtttgattcaacaacgattccgttgtgtcttgcaacattcccatgggcaaagttccgaagcaagaaaggaggggtgaaagctcatgtcttatacgacattgaagcacaagttcctgccttctatactgtaactactgcatcaaagcatgattccacagcaatgtcttcaatccattatgaaccaaatgcttattatatattcgacagggcttatgactcctttaaagaactctataggatacatcttacagactctttctttgttgtcagagccaagacgaacttaaagtataagacagtcagatggaagcgaagaatgccaaagaacataatgacagatgcggaagtgaaactgaccggatatctctccgagaaaaaatatcctgagtcattcagactcgtccgatattacgacgaagaggatgaccgtgagttcacttttttgacgaatgcaaaacaactttctgcactggatgtcgccgatctttataagaaaagatggttaatcgagctgttcttcaaatggctcaagcagcatctcaagataaagaaattctggggcacaacagagaacgctgttcgcatacaaatcagtgtggctattatcacgtactgtcttgtggctattgtccaacatgatatgaagttgaaacgttcaacctatgaagttttacaaattctcagcatatcattgactgacaaaacccacttgcgtgacctgttcgacaagactaatttcaatgatgtcaaagatctaaatgatcccctgattccggggctttttgattaattgtttaactcgtcccattttaacgggacactaatgacactatattataaataaattcaatctattcatcatcgtgcccggaagaacacaggaggtgtatctccggcatcggatactgccacacgagccgttattaccttttcatctcccggaaagagcgtaataaaattgtcactccagaataccggattaatctccttaccccggacgtccagcaaagtcagatgattgaaatgggacaaacgatccgattcgttcttcaaacaaatagaaaagacatattccccttcctctttggtaacttcaacctcctccttcaattccggtttcttcatagaagtgaaccaaaagaaatccatatgctgggaatagaaccaatataggttctcggacagaagtttaccgtatttatcatgcagctccagcttcacaaagtaattataagagtattttccacaccggggcaccgtaacaatctcctgatagcaatcgggagaaacagttatccgctgggagtcctcccaagccacttccatgtcattgttgataactttagccgtcactttcacgtcttgcagtgtctgatgggaggcattaatcacagaaaccctaaaatcattcgcattcaactgtacgtgcaccggttccatagctttttttgcaaaataataagaagcattgggagccagataccagtcgtatatctgccagcacacatcgggccagcaagaattaatcttccaaatcatcacaccggaagtaatatcccacatccggtgattagccgcttcaaacatagcacgataaccatcggcattcaggaactgggcattgtcggcatattcttttgccgtcttcggatcaccgaacatcgtacgaatggcattgtcataagagcgatagcaataattacttacatcccaagcaccatgttcagcccaaatgctatccaatgggaaaatagggctgtttacattagccgtactctccgcggtaggaataaatttccggaggctgttgtacgtcggcatggaaggcatccccagttcattgcggaacatctgcaaatggacctcacgcactttatcaaagaagtaggaagaaggcgcccaattatagtcgggcgcaccgtcatccgtcgtacctgttggtagatcttctttcagataaggagtcaaggcgtctacatcccaatgaaaactggtagtcggaagataaacacgcgtagtatcgatactcctcactttctccttggtcagcttgtacaagctttcattcatcaagacctcattggctcctatccatgaaataatagaagggtgattgcgatagcggagcatcatatcttccactcctgccaccgccagaccatgatccagaggattgtcagcagtttcagttccaggagtcatgcggaaacattgatagaaaacatgccaccacatcaggccatatttgtcaaaactttcaaaccagatttcagaaggagacggcatatcttcactgccaatcaggttgatgttcgcttctgccatcaggcgggcttcatcatagatacgtttttcagattcctccaacaagatgtccggctgtatccaaccgcccttacagaatatccgcttaccattcacataatatacacgaccacattcatctcccacccggttcagtccacttgccacctcacggattccgaaatcaaactctttggtatcggacacttttccaccgatgctaaaagacagtttcatgtgatgcaagtattgctcgccatacccattcggataccacaaatacgggttttctatcagcaaggaaggaaagtcctcaggggtcagttccactacttttctctcaccggcacgcagggctactttcttcgtcagcttgattggcttgaggtatccctccatatgcttggtataagtgggaaatttgacttcgttgattaatgtaatccaagcattcacctttccctcaacaagctttgcagaggtattcctcacttcaagtttaatgttgacctttgcaagcccagtgtcaaccttcataggcatggtagtggactttggtaaagtagtgacaacaaaaggattttcaatcaacacctcgtccgtggcttccactatcactttctggtagatacccatattccggtcgcgaaccacgggagcgcaatcccagccaccggatatcttcaatgtctcatccttaaagatatcgtaggaatgtccgcgtacaggaccgaatactttcaactgggtgccgggagtcgggacgcccggatgatccacctgataaatttttatcgcaatacaattgttagctccggcatgggcatatccggttatatcaagtttaaagcgacgaaacatacccacaatatcttttttatcagcaacctgacgaccatttacccagacatctgcccggtagttaatgccgttcaagatcagccatactttcttgcctctatatgatttgggaagaacaacttccgtacgataccagtatggatcttgccaaggattacggccacttttcaggtagttgtatttagataggtccatccggacattaaattcatccgacacatccggaatcaggtaattattcaggccgattctcggatcaggatatacgttttccttcaccaaagcattcaacacggtagtgggcacagtggcctgataccatccggcagtgggataagccaattgcgagacctcagcagatccggcgtttagctcggaagaattgataatcttccaattctccagttcaagagattgggcattgacgaacaacatgttacatatcaacagtataaaaaagagttttctcatagtttcttgttattttaatattaatgcagccgcaccaataaatccggcattgtctcccaaggcagctggcagcaaagtaatatgccgatcagctgaacgacaaatgaatttacgaaatagccactctgccttgtcccagtataaatcggaagatttcagaacagatccgcctatgatgacaatttcgggatcggtaatattcactgtccatgacaaagcatgagctaatgcctgggcaaaaacatcccatacctgcaaagccattttatcaccggaccgtgccagttcggctatacgataagccggcaactcctcctttgtatattctttataaagacgggtgacggcattgccggatacatagtcttccaatatcccttctttataaggtgaagtccatacttctccagcacaaccggaatgcccacgccatacttttcctccattaatccaagcacatcctatccccgttcctaaggtaaaacccaggactgaaccggcattccgacccgctccccataatgcctctgcataaatcagcgcattggcatcattatcaaggatcacccgcaacggaaatacttgttcaacggtgtctttcaacgggaaatagttcaaagtgggaagattctcaacatccagcagtatacctttatctatatcgagaggtccggtacacccgataccaatgccctgaatatcgtaatccgcagcatcagccagaatatttttcaacagagaaaacaaattggcaataatcacttcgccgggttctttcggattagttgcaatagtacggggagaagcataaaccaatccctctccgccaacaatacccgcactgatctttgtgcctccgatatcgactcctatggctgcctttcttcgtcccatcattattctattgaagtcactttagcaccatgtgtaaaactgccgggcaccagttccatttcttccgcccaagcattcactatcagctgaacaggaacaatggacggaattgcaaacaaatcagggtctccgcaatgaacattgatttccagcaaattcacactttcaatgccggaggagatatccgataccaggatcactttaccattaaaagacagaacatcagccacaagcctgatgctctgccgataaacaccggaccgtgaatgcgaataaatgatacagataaagccagggcctaccatctccagtggaccatggcgaaactcaccgcccaacaaagctgaagccggagtcttggtagcctccataaacatcagggcggtttgggcagcgcttgcaaaaaccgtacccctgcctatcacttgaacaaacggatgcccacttaaaaaagcgaccgaacgggataaataaatcccccctttctcaagctgaagaccgacttcccgaacgacactatctaaaagagcattatctaccctgcgaccatccaatgctcctgcaagcagatacactaccagataggtggtgataaatgtcttcgtagatgtcatttcctccctcccagccttacatagcagactgagagtagccatcgccgctaaagaacttccagactcatttgtgaccccaaccactgtcaatcgtgaatgatgccgttcaccaagttgtttaagcaattcaatcacctcatagctctcgcctgactgtgagatggcaaccaataaagtgcgctctgtcagaactgaagactgaaaatgcaataactcgccggcattgatagcaaaagcgggtatattataagcggtcatcatgatcgcggcagcttgtgatacaaaataagaacttcccataccggtaagtactattttgtcatagtcaccggttgtccacagagtacagacagcatccaaacgctccttcccttctcttgaatgataatagtcaagagtacgttccaacatttccggttgttcttgtatttctttgatgaactgattcataaaaaatatttgttttttattgattaaacactaccaattccgccaatgagctattttattgcatcaacaacacatctctattaggataaacagatatagataacagcgcttcatcactttcttttttatttacgttttttattcctatatttcagttctttcaagtatttcatatatccattgaataaatcaatggtacgagcctcgcctatgcgaatagacattttggggtcattgaacacaccggggaactgatagcaaagaattttctcaaaattatcaaacagattcaggtcgcgaattatctcttcaaccggacgtggatacaaagaattgtctggattaaagaggaatacttccaaatcaaaccagaaatgagcgtttgcatcatcacatgccttttgcaacatatcagcagcctgcttacctgtcaaatcaccttccggcatacgagcaaagccaaatgggcataaaatgtccagatagtttaaaagttccggataagtatccataccattaggtacttcaaaactgttggttgccaacatcaccggtttacccggagcaaagctgttacaataagccttaaactccttaaagaaattcacgatatcatcttttctctttttacgtatttcgggcagttgttcccaattatctaaaccgcctccactttcttcagacacataaaaagcataaaaagattcgtgatgtccatacatgtcccaaagttctttggccacacgtttatgccactccaaagattcgggagtaaaatcgaaccaagcaaacatacccacgcccatcaacacgttcataccttgtttatcagcctcggatagaatagcttctattgggtctttagccgcaatatccatgcgtccgggatataacttagatggataaaaagccttcccttggtaattatctacatttgtagaatgcttacccacatattgttcattacggaaaacttcttgaataaccatcatattcatatccaacttattcattgaacgaaccaattcgcgccattgattatcggtcatcttcttaatatcctgattccaatgctttccttcagtttcactccaatgataaatacccgcccatgccccagatatttgctgtatggaacgaatgtccgactgaataacttcgattgaatttactttccgatatacgttaccgctttcggtaaccttcaagatcaccttatgctttccaaccttatccgctgtaggaatcaccaccttcaccacatccgatttaccggcagcaatgttcaacatggtatcacagagcagagcagatgctttttccttcccccaatataaagaaacctgataagtctgttctacagagctcttatttacaattcctccacgaatatctaacttgactttattcgtaatctttccaggtggaatcaagatcaaatctattaagtcaccagcttgcacgcctagagtacacagcagtgtaaaacaaaacaataatatatttttcatgaatacaaaaaaggtttaacgaaatttgcaattaaacaatctgattaatagaaactatttgggaaagtaacaaacgactctatttcattattagcaatccgaatataggtatcaaacttacgttcaccttcacgcaaaacaatgacgcgtgcgccattggatgccaaatcgttataaactgtattaccaccggtataacgaccataagccaacaatacttccttataagccacagcataatcgttattatgatcgtgaccgacaaacatccccattacatctccacactctttaaccgaagtaaaaaagccggaattggtagtagggcaacataccatttcagccttgcaaccaaacatgcgatttttgtcttccatcaaagcatccttatattcaggaatagcaatgtggaagaaagccaatgcaggcagcggagtaccgccattattttctgtaaacgtcttgctttgttcacgataccaagcaatctgatcaaatttaatccaatcataaccagggacagactttacctgagtataagagtgcgagtcaatacaatacaggagagctgcatccttattcttatcggtagaagacttcacagtcaggacatagtccggagccacatccccaatacgaacaggcatcaaattaccctttttctttgaaatgtaatcatacaattcctgacgtgtatgatcgtattcatcatcatgattaccaaatactactgcataaggtatattacgacgaatacatacatccaatactatatcccatcctttaaaagattcattggacacaaccgcatctccagtaaaaactacacaatcaggatgttctgcatccaacacttcattcattctatccaatgctatctgagaattggcttgatcatcgtatttataatgaacatcggtaaactgaacgattttaaaatctccatttttaccaaatttcaatgtctttggctgtgcccaaactgaacatacattcaacactgccaacaaacaaaacaatatttcattcatcttcatttttgctatatattaaaccccaagttttggattgtccaaaacttgattagtatgattcattaatcttttagaaatcacgtaaggcaaaacctcataaattatacatagggtgagaatgagcctcaccctatgtcaatctgcattatccggcagattttagttctaaatactcacggtaacagattattttcctttaagtaaattttatatccttcatagttattggttcccttcttaaaggtaacccaactgaagttggtgatgtgttctgtaaagagacctgccaccaacaactgttctttcaattcagcccaatctttcgccttataaggaacattcggacagttacagcttttgaaagattcgatatccacaccaaatataaccccattctcatcacaagcttttttaacttcagcataccagttaggcaaatccacatcaaagtcaaccaaacaacggccaccaatatcttgtaaataaagatggtcaatattcggagtctgtttgaaaatacgtccgaaccattgtccacaaagatcagccggcaaacctctccataaagcaggagcaatagatactggcttattggatttagtcttgatataagaagcaacaccttccaaatacttagccagcatagaaagtgccggttcttgttgccatcctaccggataagaaccatcatggaattcttcggtgatgtaccaacctaccagacaaggattgtttccaaattgttcataaacctcatcaaacaacatcttattccgttctgcattgatgttgtatttagtaggatcagtagggtcggtcttgctataatcacccggatacaatcccaaaatgattttcataccattgcgttcagcagcttcaaacattttatcgatgatgtcacacttcacttgtacccagggcaaattagtgttcttatagaaagatacattggtttcatcatgattaccggtaaactgctgagaatactgaataatccacgtatcaatacccacttctttactatctctaaattgctgatcccaatcttcattctcatacgcatctttattcaactgaataaaaatacttgagaacttaggtgtacctccctttaattcataagaggtgagctgctccaagttatcaatttggcattctccttcccaagccttgccggaagtattttcaatttcaatacggaagccctcgttgcgattcatgagcagcgtatcagattgggtaccttcacccttcttgtacaatttaaatgcactataaggcataatcaaacgagtccaaccatctttcaacaaaatttcagtatcttcataagcaaaataagaccaacgtctgcgagtgtaatcgtgaggagcctctgcgctaaattgcttttcgtcttccataatgataaaacggaaagtagcattctgattatggcggttaccttttacccaaatggataatcctaggggatggaaagacaagtctacacgataatcaccccaacgctgctgaaagtaaaccttttcaggtgtaccgtcttcggattgtcctgtaaagttatacatcagcttaaagctgcctgccccttctttggggtcatctcctaattcataatccaagtaagctttgccagcttctttatctggattagaaatatcataaatctcacaagctaattcatcataagggttaatagacttcacagccttagtatgattgataatctgttgtttctctagaatcaaatcataaccatcgattctatatcctttatgtatgtcatcactgcaggatacaaatgccaaaaacagtgctgatattgataataaaaatgatctttccataattgaattttcaaactgttaattacatgtttcatttataagaaatacttctcgcagtattcaaccattcctaaagcataacattcgctatgctttaggaactggcactaaatactattgcggataataattcatcttatacattctgattcttgactcgtttgtatcatagccaacaatagtagatgcaatatagatatcataccctgtagaagtggcttccttatagactgcaatatctccccaacgattatagttggtaggtgcaatctcatcaccactgaacaaacagaatttatcgtaaccatcatcttccggagaaagttccatcatgctacgcttagtaatttcaaacaccttaactctggcatttgcccaagctgtataaccttgttctatgaatgctacaaatacatcattgtttacagtaaacaccttaaagtccaaaatcttataggcatgactttgaggattcatctcggtaacttccatatacggtgagaagatgtgaaaacgactacccttcttaccttcttgtgtttcatcatcttcatctgctgtagaaggggaatagaatgacaaataatgatcggaatcatcatccaatgaagcacgttgtacttgagcacgatcccagttaccaccagcaggtccgtaacgcaatgtgttcggttgattagcaggagttaccaattctccatcctgcaattcccaataataaatagtcatcattcctggagccataccataaataaatgctttacctgaagttacatctcctataacgctgaattcataacccaaatcatccggacaaccatcccctgctgtataatccagcaacaatatgtgttctttcttggtttcatcataataatataccataaatccagcaccatacgtattatcacgagcggtcaccaaatgaccggcatcgtcagtatcagctttcatcataaatgagcgagctgcctcgatagtagtaactgaagaacctgtcttcatatcataacgataaatctttccatcgtactcttgtacattcaatccctgagcattgatagccaaaccagtgatattacggctagcaatattcaactcaacggcatttttatcccacaacttactgaagcgtgttttcggaggcgtgggtaaaattcgaatcgtattgtgatgtttattaccatttacatcaataacagtaacaaatacaggattggtgaaatctgtttcgcccttaaatggattttccatataacagttgtgttccagactcactgtacacatcaaacgagtcaaatccaaaggagcgtcatctgtagtaggcacctttactgtgatttcttcattttcctcataaggacctttctttgtagccgaatattctgcaggattacccggaatcttaatagtaacattcaacaaaccattgacttgatctgttcgtccttcagccaaatcaggagactcacaagaagccaaggctcctataaacagacatgctaatatcgtaagtttattcaataatttcataaccttaaatttaattatttccactcatcaaattgttcacatgcagtgttctgttgcaattccgacaacggaataggaaaacgattgtatttttccaaatatacacgcgtagaaccggcatcacaatccactactttatattcataagtaccttcactagtcttggtgggtttgattcccttcatatgaacatcattcagcaatgttgtacccaatccccaacggcggatatcccaaaagcgatgtccttcaaaagccaactcaatcattctttcatgacgaagcaatttcataaactcagtcttgttcttagcagattttgcaggcaaatcaactctggcacgcacttcattcaaggcctccaatgctgcaggaatatccccttgttctgccatagcttctgcataaatcaacaagacttcagcataacgcatatagtaatacgtcaagtccgttgctcttatgccattcttaggtaaattctcatcaaacaacttgcgcatataataaccagtacaggtagtaccacctcctaatgcataaccatcgttacatccctcataggtataaagcgtttgccccttccaaggtgcaccgttataaagaatcgatgcatagaaacgcggttcacgacctacatacggattcgctttcattgtaggatcagaccaactgaactcacgtccatctgccatttcgtaagcagataccaaatcctcagtaggactggcttctgcataacctccatcgctgggtggacaataaaaataatcaaacgaatagtccatctcatcatcataagaataaccacattctataatactttcattattatctacacgcgcacttcttctgttcatgaacaattcaccgtaacctttatctggacggctaggattcttatacaaagcataacctaacttcttcacttccaaagcagcatcggatgcatctttccaacgttgcgcataaagcatggcacgagccaacattccccaagctgcaccttgagtgacacgtccagtatgagtagcttctccccaaggatctttggtagcatcatcccaacgcttgggcagatatttcgcagcaaacgtcaagtcttcataaatgaaatcccaacattcttcaggagtacaacgagcatggttcttttctcccattaccggaagttccttatgcaagataaagctggcaccaaatcttttagccaaatcaaaattcactaatgcacggaaaaaacgggcctcagcctcagcttcattagctatgctctctggaaaattacctctatgttctgccaagttatgcaagaatctacagcaagatagttgccatgtatgacggttatcccaattattgaaaggattagcggcaggagtaatcggagcagatccaaaaacaaacaggttttctgaatcacgtggcccattcatctttagaatatccgtacatgcatcattctctacctcacttccgtaataacctccaatcaacgaataaaagccatttaaatttaaacgtaaattgtcaacatttgaccaagctacatcctctgaataactatccgtcaaaattgggtcgatattacaccccatcaatgacagcattgcgaatgcagtaacagcaagaattttattttttgatttcattttcttcatttttagaatgtaacatttaatcccaattcatacgtacgttgttgtggatagtatccttgattaacactcggcatttcaggatccaaatgcttcaaatgggaaaatgttaacaagttaccaccagaaacataaaaacgtacttttttaatgcctgccggtgtaacccattgagatggcaatgtgtaaccaatctgcatacttttcaaacgtatgtaggtaccattttccacccaccaagaagacattttaccaccattatcccgtgaaacaatacccaaacgaggatattccgcatccggattatcaggacgccaagagttttccaccaaatagtaaggagtattaccatcacaataaaaaggttttgtatagaaagtattatcgtaacctacattcgcatacattccacagagattcacatcaaacaaagccgcaccttgccacaacatagagaaatctatacctttccactcagctccgatatttaaaccaaacatcatttccggtgtactactacgaccgatgggtactctatcctgatcataggtaatcttaccatcaccattgatatctttcagtttaatatcaccaggaagtgtaggaccataaactgcgctgtgtgcaatttcttcttccgtctggaacaaaccttctgctacaaatccccaatactcacccatcggacgtccagtactacgcatataattaggtacattaggatcttctgtcatttttaaaatcttattacgtgcccatgaaatgttaccacgaacattgtagctaaaatttttaatacaattatggtgtgtcaacaccaattcaaaaccacgattatcatgagagccataattcgtataagcaggataataatctcccaaagaaggtgggaagctggcagactgcgattccaatgaacgggttgtcttcatgtagaacacatctaattctacccccaacaggccattccacatacttgactcaatacccacattatacgtatctgtcaactcccatttcaataaggggttaactggacgactgatactcaaatacttttgaggtgtattaccgaacaaaacaatagggtctgtagacaaactagcggttgaaaaataagtcattgtattactaatagctctatcactacccaaacgtcctgccgatgcgcgaatcttcaaattttccataaaaggaacggcttccttaaaaaagtcttcttgagaaacacgccatcctacagagacaccgggaaatacaccccatctgtacttcttaggcaaggccgtcgaagcatcgattctacttgttatttccaataagtacttatcatcataagaataattcaaacgcaaaacataaccggcacgtttatctatgccatgaccacccttcaccaaattatcgttaactttttgtccccatgacatatccatgatatcggtaataggaaaatcttctctacccgctgataaacttgaaaatttagaatttgtaaattcatacaaaaacaaaccagatacagcatgtttcccgaagttattagcgtattcaatcgctggctgaatggtatattcctctgtttcagtaaaccactggttcaaggacgctgtactagcaattctgcctttttcaaccccccaactacgagtactttgattccaacaattcaaatcataaggcaaaaaatatttcttacgcatagcataatgcttcacatatgaaccattcaacttcacacttaatcctttaactggcaattgccacttcatagagacatttccttggaaataagttttcttattagtattcttaccagaaaggtcacgagcggcaatagggttgttattaccgttaccatccaagttcaagctaccgacaggaagaccgttgtattcagagcgcaagtaagggtaagacagcatagcctgctggaaaatagaagcataagtacccggaccggcaccagcccccggctcgctatctgtagaaacataaccagacaagcctaaagacaaatcaaaattatcggtaatctttgcatccatattggaacggaagttatacttatcataagaagttttatcaatgatacccttttgattataagctccaacagaagcaaagaactttaatttatctgtaccacctgatacagatacattattagtataagtaggagcaacatctttgaaaagcaaatcaaaccaatcggtattaccatatacctgttcgtcagagccaggattttcaatacgagctatttcatcagcggaaaagcgcaaactttcttctgctactccatccatacgctgtgctgtattgtaccaatacgcaaaatcgggaccatttaggaattccggaaaatttgtattctgacttaaagtaaccgaagaattcacggtaaccgtaggcttctgtactgtaccacgtttcgtagtcaccaaaataacaccggcagcagcgcgcacaccatatacagcagctgcagtagcatccttcaagatagtaattgattctacttcatcttgtgagaatgagggaaaatagtccgttacaacaccatcgacaacaatcaaagggtcaccgtcaccagcaccattaccacggatatacaaactagatccatcttgacccggttgaccactgctctgctttgtaatcaaacccggcaaacgaccggccaacatattagaaagagaaccactaggagccatcttcaattctttgttacctacttgagagatagcaccggtaacactacctttcttctgtgtaccgtaacctaccactactacctcgtccagcagttctgagtcttctttcaaaaccaccttcaaaagttttcgacctttcaaagtcactttttgggtagtataacccacataagaaaaggttaagatttcccttgtgttcggcacgctaatagagaaatgaccatccacatcggtcaccgtacctgccttacgattctctgtaaacacagacacaccaatcaacggattatccatctcgtcgaatacactaccctctaccttcacctgagcattagcgccagcactaatcaaagcaaataacaagaatagccaacaaaaatacttgtttttcattttatattagaattttattaattagtatcatttcttatccaaataaatgtattccaatgtcttccaacattgatagagtcctcttggcacatggaaacagcctttccactttccacccttcaacggtaagagcacttccccacgacggttcagataaccataccattcaggatgttcggcatccttaaaatgcgtccatgtgtaatcgtgtactttttcaaaccattccaggcatctttcatcgcctgtaaactgataacctttcaacatggaaatcaaggtttcaatgtgtacccaccataatttctgatcccattccaactgctggggaggacaacctttgcggtccatgaagtaataaataccaccgaattccttgtcccaaccatactccaacattttcaaagctgtgtccttagcctttgctatcaattccggacggttcaaacgcttgcctaaatccatgataaaccacatggcttcaatggcatgaccgggagttacctgacgaccttcaaaacaatcaaccaacgaattgtcaccattcagattttctacaataataccgcctaattccggacgcaagaaagcttccatcacctcatgtatacatacatccatggttttcaccaagaaatcttcatcgagcaaatgttctatttccaatgccaaattacaaagaatcatgggcaaggcaaagcccttcagattacgagttccgggatgcagcttgttccacttgcctttcggattatctacctttgacaaaacaatatcaaaagtctttttggctatatcagcatattcttgattaccagtggccaagcttaactgaccaaaagccatggtggcaaaggtgtaagagaatatgttataaggctcaaccaacgggttgccttggcgatctagagaaaaataccaattataattaccatcgtgaccgtactttttcaggaattctcctccatgaatagcacaatcgagccactcctgacgcttctctactttattataaagcatggagaaaagccatacttcacgaccttgcaaccaaatgaacttatctgtatcgaacacagatccatcgcggttcaagcaagtgaagtatccgccgaactcggcatcttgtgaatgttccaaccaaaaaggaagtacccgctccagcagttcttccttatactgttctgctaactgtttaaaatctaccataatattgacttatttaatggttaatataatatgttcttacttcgtataagtcaccacttctctcacccaaatatcagcacttttcactggatttaaccatttacaagtcagcgtgtaatctccttcaggctgttcatagttgaagaacaattcatgtttacggtgattgtacttcaaaggcaactcgcaagtttctaccagtttatcgttaaagtaaacttctaactgagcgacataatcttcaggaacattttcaccttgcacggctcccttgataacagcacctataccatggaatttaatttccgggaacttagctacccaattctctatagatatgcgcttatcaagcttcaatccttcaaagctgatttcaagcggtgcggctttcggttcctgatagttgatttctatcacatcctgattcaccttccccccctcgcgttcaataaaacgtaatgcctgtccgtaactcaactcgcaacctttattaaaacttacagtattattgaaaggacgatcggctacttccatcaaaacggttctatatttttcaggcaattggttataacccaacatggtagcaatgataccacctgaagaagctggattacaatctgaatcctgaccggcacgtgtagaaatatcaatggtacgttcaaaatcgccttcaccatacagcaggcccaagacaatgtaggcaccattcacgtaggcttcaatattaaaaggtacttctacaccatcgggacaagcgatatcggcggttccccatttgttttcaatctcttgccaacattttttccagtctgtaggatattgctgatgccaacagataacgtcgctcatgcattcatggaacttactttcagccggtaccgacttcaatgcttccgtaacaatgaaattcacgtcattgctcacataagccaaggaatacatggccgctacatatacaccaccataccaaccgtcgccacaagccatgatgtgcccagcacggtcgcagatatcgactgcactattcaccatacccggtgttacaataccggcaaaatcggcttcaatctggaaatccaagcaattggcatgcggattgtttttccaataaccactttcgcgagcggataaaccatgcaagaggttgtatctggcctgctgattggcatgacacaaaggatattctttggctaagaaatctacggcaaaagaatcagcaggggtatccaagccacaacgctccatggtttcgatgaaggttaaatccacatacacatcatcgtacaaaccgccaccaccatcaaaccatttttttatttcacccggtccccaaggcatcactatcgaatccggaatcatagtagacagatagcggaactctgtaggacctccatacgtacagccgataacctgaccggcccaagcaccttttaccttatcaaacagagcatcttttgatagagtaagattcaaattctcgttttgagaaccaccacatgagcataaagttaccaccaaacaaccactcaataaaatttttctaattttcatcatatctattattaaggtcaattttttgttttcatccaataacgttcaatctcttccaatgattttccggtggtctccggcaccagtttccaaactatcagcatgtagggaatacacatggcagcaaacaggaagaatgttccggcgggggtaagattttggagcatccagggggtaagctgcccaatcaggtatgtacctatccacaatgcaaacccggcaatggacatggccagtccacgcacccggattggatacatttcggaaagcaatacaaacacgactgcgcaaatggaaaccgcacagcaaaacacatagaacaaaaagaaaactagcaggaataggcttgaaatgccccatgattctccggcaataaaataaaagcctatcaataccaatgaaagaatcatgcctgaaacaccgtaatacaccaatttcttacgacccactttatcaataatggcaagagccagtacagtagtcagggtattgaccagccccaccaacacctgatagaacaaggaatcgccaccggaaaggccagccccttcaaagatggaaggaccataatacaagactgcattcactcccataaactgtccgaggatggctatacatacaccaataataacggctttcataatacccggcgacaaaagcaaggaccactctgattggatttcggaagtaagaacagacttcgtttcgttcaattgcaccaacgcttctttggaagagctgtaaatgtgctccaaaatattgaccgcacgctcttcacgattgcggacaatcagccaacgcggactttccggaataaagaagacaatgacaaagaacagcaaagcaggcaaagtctccattcccaacattcctctccatacttcattcacaaaaatccagttaaaccagttatcggcagctcctgcatgggtctcagcatacataagcaactgataattcattagataagctcctaaaaagccaatggtaaccgctaattgataaagtgataccaagcgtccacggtactgagctaccgacacctcggatatataaagaggggacacaatggaaaccacaccgatacctacacctccgacaatacggtaaaccaccaactgattgaaatctgcacataccgcacaaccgatagcagacatagaaaagagtatggccgacagaatcatggtacgtttacgaccaagcttgtcacttaaaataccagcaaagagcactcctacaatggaacctatcaacgcacagcccacataccaccctgacgacatggtatctaaattaaactgagcggttaccttggcaatggtaccggaaatgactgctgtatcatatccgaaaagaaatcctcccaaagctgccacaacagacaagaaaactacataaccaatattgactgaagatttcatagtataaaatttatcgattaaattcaaattattcttttacaagttgcttataaacagaaccgaagcgatcggtcaccagtacttctatgcgagcctttttatctttaggaacagccttaaacaaatgattggtagggaaagcattcacccaaggtgctcccatcttttcacgatcggaaaaagcttctacagcagccggatccaaaccttcacaacgggtcatctcacccatacaagtaccattctcgatccactctaccttccactgctcatcccaattccaaacattggccagcacttcttcgggaaactctttcgaactacccggagcataagcctgaaactggtattccagcggataatctaccgctttgtagtgccacttcacctgattaccatctacctcataaagtccaaagccttggggggtaccgtcagaacaaagcatggatttccaaaaacctgcacatacagcagctgtattgtgttccattaaccggtcgttgaacaccacgttaccgttcacatgtgtatgtccggtaatgaggtgtgcctcatggtctttcagcaaagcatacagactattggcattgcttgtctcgtcaggcagcaaggcattgaacttgatgtccttggtagtactggaaggaatatgcatcattacaaataccagatgatctttcggcaccaaagccaaatctttctccatccattgcagggtacgttcatcaatgtaacctatataacgataatccctattgatataaaaacaattgtctagtataatataatgtgccattccacgattgaaagaataataaatgggaccaaaatagtcctcataagtcttgtatgaatgttcaaaagaacgtacacctatttccatatcatgatttcctatgatacggtaaacaggcaatcccagaccgccagacacttgaatgtaatctaggtataaattaggagtattacccacaatgtcaccacaatccaacacgaaggcatcacgctccttggcatacttttccataaaggctcgtgccttacctacataagaacgataactgtctaaatgctcctgacagctgacttgcacatcagtctgtaccataaacacatgcttcatatcatctttcagattcctcttcaattcaaaatcatactttaaacggcctttcttaagcgggaaaaagaaagcgatatgcccaccaccctcttgcggcagataacctgcaggcgtggaaagatatacaaaccgagcatcccggttgcgcggcaactcataacgcccctgagcatcagtcagcaccacgtcaaaaccatctgtcaccacaacaccagcaagccctttgcctttacaggtcaccacgccttcaacgggatctggataaattgcagcctgcatgattgagacaaccaagaacagacaacaactgcaaaacaatctgagcataaaattcataatcacttaatattgaaatattccttatacctattatacaagtgtcctgcctgcaaatatgctgattgaggactcataaaatgagaaaactcaaaagtgatggccttgtcataaccggctcgcttggcagcctccagcttcatccgtaacttgtcaaacttaataggcaaaaagtcgatgggcatgtcacgatcaaaggtttcagcgtttgtccaacatttcatgccatacttatcagccagctttttgttcaccgtaaagaaagcatccagttcatcgtaatcgatatgtccgtcttgaaaagcacaggcgtcaaccacatcatgaatgccatcgaaaatttcattccactccctttcatgctcctgaacagaaaccgcatcctcctttgtcaacttatctgtacccatcacagcctttttcccgtcaatccacggcgagatgaaagtgggcagacctccggaaacgtccttgcactgcttgcccatagcatggaaagcatcgatagctcccttagtggcacggcttatctcaccgctaatataccaacctccaaaactcttgtatttgctgccatagttccgccagacctcgtctatcacgtatttgttatcctctatctcccaagaaaggtcacccgtatcccagtaacgtcctgaatcatagagaccaaagtaaaacttcatgctgtacttatccgctaggcgaaggaacatatccagcaaatcgacagaaggcatataacaccctttgctcaataaatgcgctgaaggataagtgatgaatttgcgatagcccgaccggatcattatgaccgtgtcaattccaatactccgcatataccgaaaatcctgatcccattccctttccccccaattctgatggggaatatcatgggatatctcatccaagaacgtgccggtaattttaagtgcatcacccatggggaccagcatggaagaggtagactcttgagaaaagaaacaatctccatcactctctcgccctaacaatgaaggggctatgaatgcagacgcacccaacaaagcggtcctctttaaaaaatccctgcgtgttttcattattaataaaattaagataaactattatatataaaacctattgaatacgcttttttaagataaaaatcaattatgctttccattgttttagatattaattgctattattcaattttcatgctgcaaatatatatatatttattatctttgcaataattaataaagtatttgattaatatataaccaattcttaacacatattaatgtgtatatactaaataatttatataataacaaattaaataaacaatacttcaaactaattaagccaaatatatcaatatattaaatcaaatagagcaaataatataaaaacacatatatatgaaacagaatttattaaaagaaatggaagccgggagcaagaatgcactcttgaaaaaaaggatcatcacacattatatatataatggaagctccactattaccgatttggccaaggaactcgatcttagtgtgcccacaaccaccaaattcatcaatgaaatgtgtgaggacaactatattaacgactacgggaaactggagactagtagcggccgccatccaagtctatacggactcaacccggaatcaggatacttcattggggtagacattaagaaatttgccataaacatcggactgatcaatttcaagggggatatggtggaaatcaggatgaacataccgtacaagttcgaaaatacacaggaagctttggacgaactgtgtgcactcatccgaagcttcataaagggaacggaaatcaacgacaagaagataatgaatatctgcatcaacatctccggaagggtaaatccggaatcaggatatagtttcagcatgttcaacttttcagagtgtcctttggcagatatactgactgaaaggataggatacccggtctgcatagacaacgacacaagggccatgacctatggagagcacatgcagggatgcgtcaaaggggaaaaagacatcatctttgtcaatataagctgggggctcggaatcggcatcatcatagacgggaaggtatacacgggaaaatccggattttccggagagttcggacacgtcaatgttttcgacaatgaaatactgtgccactgcggcaaaaaagggtgcctggaaacggaagcctcagggtcggcactgcaccgcatcctgttagaaagaatcggtagcggagaaagctccatactttcaaaacggaccgcagaaaatccgcccacattggatgaaatcatcaccgcagtcaacaaagaggacttactatgcattgagatagtggaggaaataggccaaaaactgggaaggcaaatagctggattaataagcatattcaatccggaactagtaataatcggaggtacactatcatcgacaggagactatatagtgcagccaattaaaacggcaataaggaaatactcattgaatctagtcaacaaagacgccacggtgactgtttccaagctaaaagacaaggctggggtagttggggcctgcatgctggcacggagcagaatgttcgaaatttaagacggacgctgccggtataatgggattgacaaagagtatatcaagaatgcaaccatcatatacaataaattgaaaaagcaaggcggtagttagttactgataaaagcacagaataaacctgcatcatgataaccgatttccaatactgcctcatattgtgaaattcgaaaatacaaattattaaactgttaataaagggaagatggaatctatagatatactcggaaatattacgaacataacgaagattttggaaaatagcccctaagatagggacaaaaaagcaaaaggaaaagtcaactaatctcagagctctcctacatattctacgataacgtcattagtaggtactgacctcccaatgaacagctaaaccggatgcgcttaaagcgaatcacttccctttttcaactcataacctgctgtgcattttttatcagagaatgcacagcagatatgctctttggccatgttttcttctgttagaatgatgtatttagataagatattttccatgacttagtttattttatcggtatatgtatatttttgtgatattctattctttattctcttttgaataattgatgtattcctcaaaatgtactccaggctgttgtataaaattctgtccctccatatttgccccatatacgcatatacactaaatatagtccttcgaaactttggagttcagcatgcaattcacactcctttctattatgttcgcactcttttaatcacatccttaatctactgatatatgttttgggagaaataccaaattatttcttaaatgctttggagaacaattacgggttatcgtagccgactaacccaatcaaattctgtaaactcatgtcttcagtttgcatatatagtacagaccgttctacatgttgccttgccacataagggtataatggttcattcagaacagagctcatcatacgaagcaattgccgttgagacatatttactatatcggctataacgttcaattgcaatggttgatgcaaattaaactttatgtaatcaattatttgattaactttcagcttgtatatattttcaatgctacttttcatctataactatataatttgtaaatatatagagtttatacaaatatatgattgtccaatcttgctaatttcatatattttagtgcaagatgcaaatatacatctattgacactaatcttaaaattcttattttcaacggatttcataatcaaaagttaccataaagagagatgaaaggggcaaataaacggatgcatagcattcttttagacataagaacagaaaggcataagaggagatgcttgccagatatatgatgtgatatgggtatgatacgatataataccctaaaagcaaagaaagaaaaacacttcacaagtataagaataatccccactaaaaatctgctgaccccaagaaagcaagcaaagcaaaacaaagcaaagcaaagaaagaaaaacaaggcaaagcaaagcaagcaaaacaaggcaagtataaggcaaggcagacaaatgaacttaacttctctgttcggaatgatagcccaaaaacaagaaaacccctgcatcttccgatacaggggcttctctctctaaaaaacggcgactacctactctcccactgttacgcagtaccatcggcgtgactgagcttaacttctctgttcggaatgggaagaggtggaacctcagtgctatagtcacctgaataaggcagacatgatgtaaaaagtaaagaacaaccggtaatgaaaccggtaaactgaacgtatataccacccatacatggcaagaccaaaagtgaacgggcaattagtaatgctcggctatgacatcgctgcctgtacacctgcatcctatcaacgtcatcgtctatgacgaccctaagaaatctaatcttgtggctggcttcgtacttagatgctttcagcacttatccaatcccgacttagatacccggcaatgcacctggcggcacaaccggtaaaccagaggtcagtccaacacggtcctctcgtactagtgtcagagccacgcaaatttcatacgcccacgatagatagagaccgaactgtctcacgacgttctgaacccagctcgcgtgccactttaatgggcgaacagcccaacccttgggaccttctccagccccaggatgtgacgagccgacatcgaggtgccaaacccctccgtcgatatgagctcttgggagggatcagcctgttatccccggagtaccttttatcctttgagcgatgtcctttccatacagaaacaccggatcactatgctctagtttcctacctgatcgacttgttagtctcccagtcaagcgcccttatgccattacactctgccgacggttaccaatcgtcgtgagggcacctttagaagcctccgttacgcttttggaggcgaccaccccagtcaaactacccaccaaacagtgtccccgcagccgcgggttagaactcaaataatcaaagggccgtatttcaacagcggctccacaaatactggcgtacctgcttcaaagcctccggcctatcctacacatcaattacccaaattcaatgttaagctatagtaaaggttcacggggtcttttcgtcccatcgcgggtaatcggcatcttcaccgatactacaatttcactgagctcacggttgagacagcgtccagatcattacaccattcgtgcaggtcggaacttacccgacaaggaatttcgctaccttaggaccgttatagttacggccgccgtttactggggcttcaattcaatgcttctcttgcgatgacatctcctcttaaccttccagcaccgggcaggtgtcaggctgtatacttcatatttctattttgcacagccctgtgtttttgttaaacagttgcctggaccgattctctgcgcctcaagtcaccctgaggaccctttatcccgaagttacagggtcagtttgcctagttccttaaccgtgaatcactcaagcgccttagtatattcaacccgactacgtgtgtccgtttgcggtacgggtaccacaaggattaagtttagcggattttctcgggagtatgtttacatgcactattggattgtcccgaaggacgctccatactgtcaggttcgactcttcctgcggatttgcctgcaggaatcaacatctacaccctttaacggactattccgtcagtccgcggcactgtcactgctccgtctccacgtcactccttgaggtagtaccggaatattaaccggttctgccatcggcctcgccgttcggctgagccttaggacccgactaaccctgatccgattagcgttgatcaggaaaccttagtctttcggcgagggggtttctcaccccctttatcgttacttatacctacatttgcttttccacacgctccagcaaggctcacgcctcaccttcaacgctgagtggaatgctcccctaccgatgtttacacatcccaaagcttcggtagaatacttgatgcccgattattatccacgccaaactcctcgactagtgagctgttacgcactctttaaatgaatggctgcttccaagccaacatcctagctgtcttagcaatctgacttcgttagttcaacttagtattcattttgggaccttagctgttggtccggattgttctcctttaggacatggaccttagcacccatgccctcactcctgacatagaactgacacgcattcggagtttgtcaagacttgataggcggtgaagccctcgcatcttatcagtcgctctacctcatgccagtataagtcaaggctgcacctaaatgcatttcggggagtacgagctatctccaagtttgattagcctttcacccccaccctcaggtcatccagaagcttttcaacgcttattggttcggtcctccagatggtgttacccatccttcaacctgcccaagggtagatcacttggtttcgcgtctactccttccgactgaacgccctgttaagactcgctttcgcttcggctgcaggtctcaagacccttaaccttgccggaaaaagtaactcgtaggttcattatgcaaaaggcacgccgtcactcgtaagagctccgaccgcttgtaggcgcatggtttcaggaactatttcactcttctgttcgaagtgcttttcacctttccttcacagtactggttcactatcggtctctcgggagtatttagccttaccggatggtcccggctggttcacgcagaattcctcgtgctccgcgctactcaggataccactaggcttcgactggcttcgtatacgcaactatcatgctctatggttgaactttccagaacattctactcaccagttttcttgccacaacgtggtcctacaaccccacatatgccgtaacataggtggtttgggctggtccccgttcgctcgccactactaggggaatcattatttattttcttttcctgcaggtactaagatgtttcagttccctgcgttagcctccaacttggttggatgattggccttcaaccaatcgggttgtcccattcggaaatctccggatcaaaggttatttgcacctacccgaagcttatcgcagcttatcacgtccttcatcgcctccgagagccaaggcatccgccatgcgcccttgcttacttttagtcttaccgacaacgtatggtcgatatatactttcagctttaactttacttttttctgttacatcatgtcaaagatcgtttgagaatattccgatttaacggaatctcaagagtggagaataacggattcgaaccgttgaccccctgcgtgcaaagcaggtgctctagccagctgagctaatcccccgagatagtggttagtaatagacggtcagtgattggtaattagtaattagaattagtaattaaaatcgtccgtgtctctcaccaagactatgtcgtagtcccaggcagagttgaactgccgacctctacattatcagtgtagcgctctaaccaactgagctataggactgtcagtcaaaccctagcccgaaggctcggcttctactttctctttatattattaataaacaatcttcgcagtacaagaggttcttatggaggtaatctctttagaaccaacttttcgtctttttctgagcgtcgctccagaaaggaggtgttccagccgcaccttccggtacggctaccttgttacgacttagccccaatcaccagttttaccctaggacgctcctcgcggttacgtacttcaggtacccccggctttcatggcttgacgggcggtgtgtacaaggcccgggaacgtattcaccgcgccgtggctgatgcgcgattactagcgaatccagcttcatggagtcgggttgcagactccaatccgaactgagagaggcttttgggattagcaccacgtcgccgtgtagctgccttctgtaccccccattgtaacacgtgtgtagccccggacgtaagggccgtgctgatttgacgtcatccccaccttcctcacatcttacgacggcagtccgggtagagtccccagcataacctgatggtaactacccgtaagggttgcgctcgttatggcacttaagccgacacctcacggcacgagctgacgacaaccatgcagcaccttcacaactgtccgaagaaagaaccgtttccgattcagtcagttgcaatttaagcccgggtaaggttcctcgcgtatcatcgaattaaaccacatgttcctccgcttgtgcgggcccccgtcaattcctttgagtttcaccgttgccggcgtactccccaggtggaatacttaatgctttcgcttggccgctgactgtatatcgccaacagcgagtattcatcgtttactgtgtggactaccagggtatctaatcctgtttgatacccacactttcgagcatcagcgtcagttacaatccagtaagctgccttcgcaatcggagttcttcgtgatatctaagcatttcaccgctacaccacgaattccgcctacctctgttgcactcaaggtcgccagtatcaactgcaattttacggttgagccgcaaactttcacaactgacttaacaacccgcctacgctccctttaaacccaataaatccggataacgctcggatcctccgtattaccgcggctgctggcacggagttagccgatccttattcatacggtacatacaaaaagccacacgtggctcactttattcccgtataaaagaagtttacaacccatagggcagtcatccttcacgctacttggctggttcagactctcgtccattgaccaatattcctcactgctgcctcccgtaggagtttggaccgtgtctcagttccaatgtgggggaccttcctctcagaacccctatccatcgttggtttggtgggccgttaccccgccaactgcctaatggaacgcatccccatcgacaaccgaaattctttaataatcatcccatgcggaataattatgccatccggtattaatctttctttcgaaaggctatcccagagttgtcggcaggttggatacgtgttactcacccgtgcgccggtcgccatccatcaaagcaagctttgatgatgctgcccctcgacttgcatgtgttaagcctgtagctagcgttcatcctgagccaggatcaaactcttcattgtaaaagtattgttaatcattccatataggaatggttgttgctctgttcaggacgctcgaatttaaaaagtatctattacctatttaataagtaatgacggttctttttattttacccaagaccgtttctttttcagaaacaagtcttgctcttgtactacttgtattgtttatgtaaatctcttcaaagatcgcttcttttatgtcggctttcttttcaggaaagcggatgcaaaggtaaaaacttttaagtatatcttccaaatattttcggaagttttttttcatctttcctttttcccgtcatctctcttgcgaaagggagaacaaaagaaagattgttttaccgacccggattcaagaaaaagtgtcaaccaacgctgcttactttttgaaagcgggtgcaaaggtaagaactttatttcatatcttccaaatatttccggaagttttttttcattctgctttttcaaagggaagattccagaaaggaacaagccccaagcagaagaaatatgtaagagttcctacgccgttcctgtcagaatgtcaaaacatcgctgctcccgttctcgaaagcgggtgcaaaagtagaactttataacatacacaccaaatatatcaggggattttttcgcgtttctcttgaacatttttataaaacgctgattgacaaatgtgttgaagaacatattttttaaggaggatggaaagccaggcaaaagggacacattataatatatgcgcatgcgagcggaaaggaacaacggaaggcggaaagaaaacacggagatacggaagggcattgcatgacacccgggtcttgacatgttcgacatccgggtctcggcacgtctgacacccgggtctcggtatgcacgacacccgggtgtcggacacaagaaaaagactaacgcgactaatgacacaggaagaaaacaatacagaaacatgcaacgaaaagaaagacagaaagaaaaagtgaatactatgtttaaagagtatttctattcattgtttttgtgcagcagaccaatcatccatttttttgaacagtacattccacttgttcacacttataatccacttgttaccaacattatataccatcaacagcattacactttcaatttccttggattctttttgcacaatggagccgagctataatctacctggctaaaggaaaacttttagccattattttagatgagaatactctgacagaattactttatgctctttcaacttgataatgtggcagaaaccaatattgaaataattcaatacactcctaaagtcactaacaaaactttatctgtcactatataccttgctttataaccggaagcccaaatccgccctgacttaaagacaaggctttcggctgccctttctgtgcattcctataaacggcacgagaaacatgcaatgtttttaccgtaccattatcaaaagctacttcgagataatattcatagcgcataccatcggatacataacgatgctttcctaccttgcgccgtttttcatgttgctccatacgtttatcgagtacggttacagttacctcatactcgtcagcgtccgccaacaaattgttgcctgaaagaaacaatacataacagaaagaacccacgcataccaaatgacacagtacattcacaatcctgttctctacggtcgtcagccatatccacttccgatagagaggaagagtcaacatacctgccgccaatgctacgccaacaggtatccaccaggctgccaatgttttctcagaaatcacatatcccatagtgcccgagaacaatacagccaagaccacaaaaatgcgtaatattttaataaacagaatccccatcgctttaatttgtattttcctgcaaatataaaaataaaagtgacattgcaaattctcacacacagcattccgcatgaactaacttacctaacagagcgttataactgtacaaacttaaagaaacgaccattatggaaaagaacttgattcatagtaatgaattgcatttcattgataaaaaacgcattcatcgggcggtagagcagttggttgagtcattggaactggcagcaggttccacaacgggatttaatctgtatgcagtagtagagagttatttcactgacttgaacaaacgaaaggaaataaaccgtttgcttaatcttgagcaaaatatttgtgaagaagtagaagaagaactaggagtgtacgaaatgtaaaacaatgtatgcatatcagtgaggctatatccaaactaaaattcgcctattatttgtttctttccgagcacgggattacacggaaaacacagatttttcttcattctttttccgtgaaatccgtgtagttccgtgcctaaaagaaatcatcagatgtattttgacctcaatattctttcaacattcgactttcctatcaatcctttgcctgatgcactgtcagttgcgggaacgggaaaccgattccttcttcgttgaatacagtataaatagtcttgttcatatcaaaataaactccccaataatcgctgctcttcacccaaacacggataacaatatttacactgctggcatccaaagcatgaagggcgacaaaaggcgccggagcattcagaatacgactgtcggcagcaagtatacggcgtacggtactttccaccttatcgtaattctcgccatattccactccaataacccagtctacgcgacgggtatcctcacgactgtaattagtcacagtaccgctactcaaagcaccgttaggaatataaatcaccttattatcagccgtagtaagaatagtatggaatatctgaatctcgcgcaccgtaccggacacaccctggctttcaatccaatcacctaccttaaacgggcgaaacagcaagacgataagtccgccggcaaaattctgcaaatttccggataacgccatacccaccgctacaccggcagatgccaacaaagctgcaaatgaagttgtttcaactcccaacttgccgataacggcaataattaacagaattgtcagtagaatattcaccagactcttgacgaaactttggatacccgcatcaatgtgccgcttcatcagtagtttagacacaagttttttaatgaaagaaataaggaaacgcccaaccacaaagattataactgcccctataatacgaccgccggctcctactccccaatcaatcagttgctgcataaaaatctgaagcttgctgaatccctcttcagaagcctgggcgacaaacgccgccattaataaagatgataacataatgattatagtttaatggattaatgaatacaaaattaacaaataaatccatttttcgttcacattatttgtacctttcgaccaaaagaaatacttttgcctctgatttcaattaaggggtgccctaatattacgggctgagatcatacccattgacctgattcgggtagtgccgacgtagggaaaagaagaaaagttccccttttctgtagtaatctttaataattcaaattgcaaatgaaaaagtatgcaatgacagcatgcctgtttatggcagcgctgaatgtctgcgcacagacaaaggaaaaagacagtttgcgggtaatagacttacaagaagtagagattatctctacacgcgccacaggaaccactccggtggcatttaccaacatcaacaaagaacagcttaaaaaacagaacttcggacaagacttgccgtatctgttgagtatgactccctctgccatcactaccagtgatgccggagcgggtatcgggtataccacattgagagtacgcggtacggacggaacacgcatcaacgtcaccgccaacggtattcctatcaatgatgccgaaagccacaatgtattttgggtaaacctgccggatttcgcatcgtccgtcaaagacatgcaaatccaacgtggcgcaggaacttccaccaacggtgcaggagctttcggagccagtatcaacatgcagaccggagacttctcactgaaaccgtatgccgagctgaacggttcgtacgggtcgttcaatacacacaaagaaacggtaaaagcaggaacaggacttatcaacggccattggtctttcgacgcccgcctatccaatatcagttcggacggatacatcgaccgcgcatcggtcggactgaattcttactacctgcagggcggatattacagcgacaacacttctatcaagttaataacatttggcggcaaagagcgtacctaccatgcctggaattatgccagtaaagaagaaatggagaaatacggccgccgttacaactcttgcgggtatatgtacaccgacgacaacggcaccgaccatttctatgaagaccaaacggacaactacgtacaaaagaactaccaattgcttttcaaccacagcttcacttccgcctggaatgtaaacgtaggtttgcactacaccaaaggagacggctactatcaagaatacaaaggcggacgcaaactggtggaatatggcctgttgccatacgaacatgacggtgaaaccgtaagcaaaagcgaccttatccgtaaaaaagcgatggacaactggttcggcggcggtatcttctccgtaaattataagggcaaccgccttcatacatccctcggcggcggactgaaccgctatgacggcgaccacttcggcaaagtgttgtgggtgaaaaactacatcggcaacctcgaccctgacaaagactactaccgcaacaatgccacaaagaacgacggtaacctttatctgaaagccaactatgagttatgcaacggggtcaatgcctatgcagatttgcaataccgccacatctcttataaaatgtacggacagaacgacaagtggaacagcgttaccaatgacggtctgcaacaacttgccattcacgagaagttcgacttcttcaaccccaaagccgggctgtcatggcaaatcaaccgcaacaaccggatatacggttcgttcagcgtagcccacaaagaaccgacacgcaacaactatacggacggcaagtttaccgaacaccccaaagcagagcgtctgttcgactacgagctgggatacacctttgccaattcctggctgactttcggcgccaatctatactacatggactacaaagatcagctggtgctgaccggtgaactgaacgaaatcggtgaagccgtagccgccaacgtacccgacagctaccgtatgggtatcgaactaatggcaggtttaaagctgccttgcggtttccaatgggacatcaacgccacgctaagccgcaaccgtgtagaaaactttaccgaaacactttatgaagacgaagaccctaccggcgacacatggagcacttatctgggcgatacccacattgctttctctcccgactttctgctgaacaaccgtttcggatatatctacaagggctttgaagcatctttacaatcgcaatacgtcagcaaacagtacatgagcaacctgaattgcaaagaccatattctggatgcctatttcgtcagcaacctgaacctatcgtacacattcacgttgcccaaaacaaaatcgataactgtaggctgcaccatctacaatctcttcaacgaagagtatgagaacaatggctacgcaggcagcggcttctattatgagaacggacagaaagtgcgctacaattatgccggatatgccgcacaggccggcactaatgtattaggacatatctccttgagtttctaaatttgattatggagcagacactcgaaattatcggaacacttgtcggtcttctctacctctggctggagtatcgggcaagtatatatctttggatagcaggcatcataatgcctgctatctatatcttcgtgtactacaatgcggggctgtatgcagacttcggtatcaacatctactacctcggagctgccatatatgggtggatgatgtggaaatacggagcattcttacgccggacaatcctgaaaaggaaaatcccggatatggaaaaccaacaacaggagcttcccataacctgcatgccgtcaaggtatctgttgccacttattgcggtatttgccgttacgcttgccggcattgcctgggtgcttatcaactttacagacagcaatgtcccctggctggactccttcactaccgcgctcagcattgtcggcatgtggatgctggcacgtaaatatgtggaacaatggtgggcctggattggcgtagatgctgtgagtacaggattgtacatctataaaggactcgattttaccgctgcattgtacggcctttacacaataatcgctatctttggctatttcaaatggaagaagttgatgaaaaaagaggctgatttatgatttataaattccgatttagcaagtatcaactatgaaagtggaagctgtggttttagcaaacggggaatatcctaccgctcccctgcctttgcagatattggcagatgcgccttacgtagtctgttgcgacggcggtgcagacgaatacatccggaacggacatacccccaatcttattataggtgacggcgactccatcagtgaggagaaccgcaagaagtacgggcatctgcttcaccgcattgccgaacaagaaacgaacgaccagaccaaagccgtcaactacctgttatcgcaaggcaaacgccggatagctatcgtaggcgccaccggcaaacgcgaagaccatacgttgggaaacatcagcctgcttatggactatatgcgtgctggagccgatgtgcggacttatacagatcacggtatcttcatcccttgccagaacgcatgtacttttacctgccaaccgggacagcaagtatccatcatcaacttcaatgcccgcaaattgcatggactcggcttggtataccctctcagcgacttcaccaactggtggcagggcactctcaacgaatgcatcggaacagagtttacgattgaggcggaaggggagtatctggtttttttgaatttccctcagccacttccacaaagtacacgctgatacaaatcatagcaatggcaacggcctgtgtccaactgaaccggtcctgtcccaaagaaagcgagacaaccgtggtcactaccaatatcagatagctgtaaatagcgacaacggtagtcttcaggtacttcaacccgacaggaaccaggaagtaactgagataagtagggaaaataaggataaatgcaagtacagcccacgccgtccaatgccactcgcccttccaggcttctgcaaacatcggtgcatcccaccctgcaacggacgaaacgattatgccggaaacagcagctccgccaaatatatatttcatcattgtcactactcctaccttctccagcagtttcttgcttacaatcagataaacggcaaatacaaacgaactgatcatacaaagcaaattgccggtaaaggcatcgcgtgccaaatcatcgcttccctgcgtcaagatacacaacatcgcaccgccaaaccccaaagctataccgataatcttcattaccgtagctttctcgtgcagaaagaaaacggaaatgagaaatacccatataggctgcatcgaattgaatatggcgctcgaaaccggagtggttttgctgatgcccagcagatagcagaacataaatccataaagcccgaacgccccgaggcaaaacagcatgatgcgttgcttcctggtaaccgccgcttcttttataaaacaacccgtcaaccaaaaagccactgccgcaaacacgcaccgtatggtaacacccgttaaagctcccaaccacaaaggcaataaatacttcaatccgttcatgttcagacccgccatgacacgggacgcaaccatactgagattggcttccagctttttatctttcatgagactatctacattgagttcgaggtagtgagaacgcatagcaccgggaaatgttcggaaacatacggaacgttatcctaaacaattcgcaactttgcaatgtttttagggaaacaggagactgaaaaatgaaagaaacagaacccaaacaggcatcaaaccccaccaaacaagtgctcgtattctccacccgcctacgccaggatatccaaaccgcttgccggcaactggaaaacggagaagggcaagaagatgttacaatcaataaggaagtaaagtcatggttaaacaaataaattggtcgccacttgccaagggggaactgaggagcctgctgttatcctcagtgcagaggtttggaaacaaagaacagggaaagattatatactcactcttccagaatgcacttcatcgcattactctaaatcctttcatcggacaagccacggaagtggataacatacgatatatcactccttgtcccgactatacgctattctaccgccacagccttctaaaaatagaaatactcgtgctttgggataatagccataaagccggaaagataaaaagcattcccacaggggaacaagaagaggcgtcaaaactcctttgatatttttttagttttgacacctcatcctatcagaaacaaccggtaatcagacattcattaaatagcgcttgaagtctgcaaaatctttcgacataggcagactcttcttttcgccacgcataaaggcttgcaacttctccggtatctgtatcgcctcaccgataatattctctaccgtatctttgaacttggcaggatgagccgtttccaggaagacgcccgtctcacccggctgcaagccctcttgcaatgcacggaaaccgcatgcaccatgagggtcgagcaggtaatgctcatctgtccaaacgttcttcacggtttcggctatctgttcgtccgtataagcagcaccgcttatctcggcagagatagctgcatggctaccgccatagaggtcgagcacacgggcaaagttactcggatcgcccacatccatggcattggctatcgtagcgacactgggtcgcggcgtataaacacccgtctgcaaatattgatagaatatgtcgttacggttgttggatgctatgaaacgctttatcggcagtcccatgcgtttaccgaacaaaccggccgttatattaccgaaattgccgcttggcacacagattacggcattggcagccttacccgcccgcttcaactgcgcataagcataaaaatagtagaaagcctgcggcagaaaacgcgccacattaatggagttggcgctggtaagttgcaaacggctgttaagctccttgtccatgaaagccgctttcaccaatgcctgacaatcgtcgaacgtgccatctacttcaagagccgtgatattctgtcccaacgtagtgaattgcttttcctgaatttcactgaccttgcccttcgggtagagcacataaacatgaataccttctacaccgaggaaaccattggcaacggcactgcccgtatcacccgaggtagcaaccaatacattaacctgcttcttgccctcttttctgataaaatagcccaacaggcgcgccataaaacggccgcctacatccttaaaggcaagtgtagggccatggaacaattcgagggaatagatattttccgtcactttcaccaaagggacatcgaagctcaatgtatcgtacacaatctgcttcaatgtatctgcgggaacatcttccccaaagaaagcatccgccacccgataggctatctcctgaaagccaagcgtatcaatgctgtcgtagaattcctgcggcaacggtttaatggtaaagggcatgaaaagtcctttgtctgcggcaagccctttcactaccgcctcttcgagggtaacatcgggagcttgtttgttggtactataatattgcatattaaattaaatattaaagaattaataattaaaggctatgacgctgtaccaaatgataatcagcacatttgggcatgtcatctcattatcccttcataaattcgtttataaactcatcttctttcatcagaccgtagctgccgctgcaagccgccacttcatcaaaagtctgcacctcgtccggctcaatacccggataccaaataaagaaaggtaccggttcgttggtatgtgtacgcagctcgcagggagtaggatgatcgggcaaaacggcaatggcgacaggttcttcccaatctttcaccgcttcataaataggacctacggcgcggctatccagattttcaatggtcagcctcttcaaagaaaggtctccttcatgtcccgcctcatcgctggcctcgatatgcaggtaaacgaaatcatccgttttcagtgcgtcaagagcggcagccactttattctcgtaattggtatcgtacagtccggtcgctccttccaccgtcaggcggcgcagtccggcataatagccgataccgttaatcaaatctacggcagagattacagcacctttcctcacttgaggaaacttatccgaaagtgtttccatctgcggacgataacccgggctccacggccaaatactgttagccgggtctttgccttcggttgcacgcttcctattgacggggtgttctttcagcaattcttgcgaacgcatgattaaatcgttaatcaagtcggcggtttgttgcggggtcaaatcggcttgtccttcgggaacggtgatactttccgtacctgccataggctttaccagcaagggccgatagggtttcagagggacatcatgcggaggagtacagtctatacgcttgtctccaccttttattaccaacaaatgccggtattgcacacccgtatggaaacgcacgcgctcattacccaaatgttcctgcagatatttcaccagcacatcggcttcttcggtcgtaatatgtcccgccgaatggttcttgatagcacctccttcaatgcagataatattacagcgcatcgccatttcacccggcttcaggtctacaccgatacttgccgcttccaacgggccgcgtccctcatatactttcggcaggtcatagcccaaaacggacatattggcaacctcactgccgggatgaaatccgtcggcaacagtttttaacctgcctacacgccccatccgggcaagcttatccatatagggtgttttagctgcttgcaacaaagtcctgcttttcaaagactttacaggccagtcggccataccgtcacctaatataataatgtgtttcatacccatgaatcttgaaatccaagtacgaagttcgtacttaattaaacgttcgcaatactcattatatccgcaaatactcccgcagccgttacaccggcaccggcaccgtagccttgtatcatcatcggatattccttataacgctctgttgtcagcaagataatattgttgctgccttccagcccataaaacgggtgattgacacccacttcctgcagtcctacggaggccttgccgttctccagtctggcaacgaaacgccaatgcttgttttccgcttccaacaccttgcggcgtgcttcaaagccggcgtcgaggctcggcactttcttccagaagtcatccaaagaaccttcgaagaaatcatcgggtacaaagagattcttttccacatcactttgctcgatgcgataaccggcttcacgtgcaaggattaccagtttgcggattacgtccttgccgctgaggtcgatacgcggatcgggttcggaataacgttcctcctgagccattttaatggttctgctgaaaggaatatccgcgcttatcttgttgaatatataattcagcgtaccgctcagcacggcttcaatcttcagtatcttgtcaccgctatgaataaggtcgttaatggtattgatgataggcaaccccgcacctacgttcgtctcaaacagatatttcacgccgcgctggcgggctatctgcttcagttcccggtagttttcatactccgaagaagccgcaatcttattggcggctacaaccgaaacgttgtgcatcaaaaggtctttatacaaggaagctactcctgcacttgccgtacagtccacgaatacggagttaaagatattcatgccgataatctcgttacgaagcgtatccagagagctttccttacctttttccgccaattcttcgcgaaagcgtcccaaatcaaatccctcgcggctgaaaattgctttggaagcatcggcaatacctaccacattcagttgcaagccgttctcctgcatcaatttctgacgctggctgtgaatctgttctatcaaactgccgcctaccgtaccaactccgcagataaagagattcaatacctgatattccgacaggaagaaagagtcatggatcacgttcaaagacttgcgcagcgacttgctgtctaccacaaacgaaatattcgtttccgaagcgccctgtgcacaagctatcacattgataccgttacgtcccagcgtaccgaacagcttaccggcaatacccggcgtatgcttcatattctcacctacaatggctaccgtagccaaatccttctcagcctgtatgggtgaaatctctcccatttcaatctctttgacaaactcttcgttcagaacttcacaagccaggtcggcatccgcattacgcacaccgatggaagtagaattctccgaagatgcctgcgatacgaggaacacactgataccgttctttgccaaagccttaaagatacggtagttcacaccaatcacacctaccataccgagtccctgcaccgttatcagacttgtatcgttgatagacgaaatacctttaatggctttactttgcggattggaaacatcctgcttgatgaccgttcccgctccgtcgggattgaacgtgttctttattataataggtatgttcttgtggcaaaccggatagatggtaggcggatacactaccttagcgccgaagttgcaaagttcggtagcttctacatagctcagttcattaatggtataagccgtggaaatcacacgcggatcggcggtcatgaaaccgtccacatccgtccagatttccagtgcatcggcatccagcgccgcagctatgatggcagccgtatagtcggaacctccgcgaccgaggttggtcacctcacccgtaatcttatccgtagagataaatcccggaaccagcacccgtcggggcatatccttgaatatctcgcgcaccagggaagtagtaagctccgtatccaatacatgcttggaatgtttcttctccgttttgatgaaccggcgcgaatcaaaccattccgcacccgtcagttgcgctgcaataatggatgaaaggcgttcgccgtagctcacaatcgtatcggatgttttctgcgagaggtcctttatcaggtaaatcccctggaagatatctttcagctcattaagcaactcccccacccggcgttgcagtgatacttgcgcctcacctgccggaattacttcctttatcatttccacatgacgatagacaatctcacgaaactcgttttcataagaggaatcaccggcagccgccattttcgaagtattgatcagcttgtccgtaatgccgcccaaggcagacactaccactattaaaggttcgtttatagcctctacaattctcttaacgcttaaaatactgttcgcagaacctacggatgttccgccgaattttattactttcatatttttttatcggattgaaacggttgatacaattgtcaaaacaagctgctatggcccgtatagactttaactaaataagaaaaactgctgaaaaattggtgtaacacgtagaaacacaaaatactatccctaacccctaagggtcatggtacacatggatgtgactgtatgttgatagtacttgttcattctctcttactgctatcgcttatgataagtgttgcaaaagtaacaataaaaacattcaaactattacattttatgacttttttgcgataaaaatacagattcattctataaagggaagaaatatgtacatattacggctaacatattcacgcttttccaaacaaagagatataaatactggcatagttttataacactttgctattattttagagatatattactatctttgcatggtaattatgtaagaattgagcgtatgtccccaaataatacttccgttttgttaatttacaccggtggcactatcggcatgatagaaaatgcggaaaccggagctttggagagcttcaacttcgaacatttacagaagcatgtacccgagcttcagaattttacgttccgcattgatacctatcagttcgatccgcctatggattcttcggatatggatccggatgcctggcgcaaactcgtacgcattatcagcgacaactacaatcaatatacgggctttgtcatccttcacggcacggataccatggcctacaccgcatccgctctcagttttatgctcgagggcctcaacaagcccgtcatcctcacgggttcgcagcttcctatcggcgtgctccgtaccgacggtaaagaaaatctgctgacaagtatcgaaattgccactgcccggcatcccaacggccggcctatcgtgccggaagtatgtatcttctttgagaatcacttgacacgcggcaaccgtaccaccaaaataaatgcggagaacttcaatgctttccgctcgtacaattaccctgtacttgcttctgccggcatacatattaaatataataatgtgcagattcatacggagaacgtacaaagagagttgcagccacactacctgctcgataccaatatagccatattgaagctcttccccggcattcaggaaaacgtggtggatgccattctcgccataaagggactgaaagctgtggtgctggaaacttacggttcgggcaatgctccgctgaaagagtggtttctccatcatctgcacaatgcctgcgaacaaggtattatcattgtaaacgttacccaatgcagcgccggtacggtagaaatggagcgttatgaaacgggataccgcctgatgcaggcaggcgtggtgtgcggatacgacagcacaacagagtccgctgtaaccaaactgatgttcctgttaggtcacaactatccccccgcaaaagtacgcgacctgatgagccgccctcttgcaggtgagataacgatataggaagagaggtgtttacgccactacgggagtcaaggccccggtaatcgaatcaatgataaacccggaaacatggacatcctccggtatcagcggatgatcaagaatggctttcaccgtttctcttacggacttctccgtatctccgaagccataaagccacgaatcgaaatccactccgcagaaacgtatcatatctatcgtttcctgtttgatgccgcgcgccttcatgtgctctatcatctgggcgctgctcatgtggcacgcaccgcaatcggaatgtgcaatgaccatgacctcttccacccccaactcgtagatagccaccataaggctgcgtataacgctgccgaaaggatgcgaaatgattccgcccgcattctttatcatctttacatcaccgttctttatgcccagagctgccggcagcaattcggtcagacgggtgtccatacaggaaaggatggcgattttcttatcgggatatttattggtgatatacttctcatatcccttattctctacaaaccgcttattgtattcaagaatatcttctatcatagtataatcccagttttatatttttgagaacaaatatagaaaaaactctgtgacacaccgccagccctgaaacgaaaaatcgtacctttgggcaattattctaaaggaagttcttttatggcaaaagagaaaacggtatatgtatgcagcaattgcgggcaggaatcgcctaaatgggtaggcaaatgtccgtcgtgcggagcgtggaacacctatgtagaagagattgtacgcaaggaaaccgtaaacaaacgtccggtatcgggcatggaaaccgccaaagcaaagcccgtgacactggatgaaatcgctgccgatgacgaaccccgtatcgacctgcacgatgcggagctgaaccgggtattgggcggcggtctggtacaaggctcgctggtgctgataggcggcgaaccgggtatcggaaagtccaccctggtgctgcagaccatcctccgcataccggagaaacgtatcctctacatatccggcgaagaaagcgcccggcagctgaagctgcgtgccgaccgtctgtcaggcacatccgccgactgcctgattgtctgcgaaacctcgttggaacagatttacgtccacataaagaatacacgccccgatttagtcataatagactccatacagaccatctccacagagacgctcgaatcctctcccggcagcatagcccaggtgagggaatgctccgcctctatcctgcgcttcgccaaagaaacgcatacggcggtcatcctcatcggccatatcaacaaggaaggaagcattgccgggcctaaggtactggagcacattgtggacaccgtgctccaatttgaaggcgaccaacattatatgtaccgcatcctgcgcagcatcaaaaaccgtttcggcagcactgccgagttgggcatctatgagatgagacaggacggactgcggcaggtaagcaatccttcggaactgctcctcagccaagaccatgaaggaatgagcggcatagccatcgcttcggccatagaaggcatacgaccgttcctgatagaaacgcaggcattggtgagcagtgccgtttacggcaacccgcaacgttccgccaccggcttcgacatacggagaatgaacatgctgctggcagtactggaaaagcgggtcggcttcaagcttgcccaaaaggacgtctttctcaacattgccggcggactgaaagtgaacgaccccgccatcgacctggcagttatcagcgccattctgtccagcaacatggataccgccatagaacccgaaatctgcatggcgggagaaataggcctgtccggagagatccgccccgtaaaccggattgagcaacgcatcggcgaagcggagaagctcggtttcaaacggtttatattacccaaatataatctgcagggactgaacacgtccaaattgaagattgagctgataccggtaagaaaggtggaagaagccttccgggcattgttcggctaagtcctccataggatgagtccgccgcaggagatacggattgatacacattatatatagatatagaaagaaacccaatgatacaagaataccaattgcgcgtgttgcctgaggttgcagccaacgaacaacgcataaaagaatacctcatacaagagaaaggagtgagcgcacgcgacattacggctacgcgcattctgaaacgcagcattgatgcacgccagcgaaccatcttcgtaaacctgaccgtgcgtgcttatctcaacgagttgccgaaagagaaagagtatcaggaaaccgtctataacgatgtgtcggacaagccgcaagtcatcgttgtgggagccggtcccggcggactgtttgccgccttgcgtctgatagagctgggcttgcgccccgtcatcgtggagcgcggaaagaatgtacgcgaccgcaagaaagaccttgccctgataggaagggaacagaccgtcaacccggaatccaattacagtttcggagaaggcggtgcaggcgcctattcggacggcaagctctatacccgcagtaaaaaacggggaaacgtagacaaaatcctgaacgtattctgccagcacggcgcttcatcttccatactcgtagacgcccatccccatatcggcacggacaaactgccgcgggtcatagaaaacatgcggaacaccattatcggttgcggcggtgaagtgcactttgagacacggatggatgctcttattattgaaaacgatgaagtgaaaggcatcgtaaccgataccggccggacattcctcggtcctgtaatacttgctaccggacactccgcacgcgatgtataccgctggctggcagccaacggagtggaaatagaagccaaaggcatcgccgtaggagtacgtctggaacatcccgcttccctgatagaccggatacaataccacaaccgcaacggacgcggcaaatacctgcccgccgccgagtacagcttcgttacccaagtggacggaagaggcgtgtacagcttctgcatgtgtcccggcggctttgtagttccggcagccagcggtccccagcaaatcgtagtcaacggaatgagccccagcaaccggggttcccggtggagcaattcgggaatggtagtggagctgcgtccggaagacttggagaataaggagttaagaatgatgaatgaagagccggctttcaactcccaactcagcatgatgtattttcaggaagctctggaacgcctctgctggcaacagggcaacatgaagcaaacagcccccgcgcaacgcatggcggactttaccaggaaaaagctcagctacgacctgccggaaagttcatacgcccccggactggtatcgtcgcctctgcacttctggatgccgccgttcattgccgaccggctgagcaaaggtttccagcaattcgggaaatacagccacggtttcctcaccaacgaagctgccatgattggcgttgaaacccgtacatcggctccggtgcgcattgtcagagataaagacaccttgcagcatgtccgtttgaaaggactgtttccctgcggagagggagccggatatgcaggcggcatcgtgtcggcaggtatcgacggagaacggtgtgcggaagccgcaggccggcttttgctgcaatgagagtagcagagttccgcatgcaggtgaaattcatttccccgcattacaaggatgatacaaaaataatccgtacttttgcgggcaaacctataccgttatgacagctcccgaaatagcaatcgtcgctcccaacacattgacctctttgggattgcagaaccttctggaagagattatcccgatggctactatccgtgtgttccgctccttcgccgaactcatggatgatacgcccgacatgtatgcccattatttcatctcttcccaaatatatttcgagcatacctcattcttcctgccccgaaagcccaagaccatcgtactggcaggcggcgacaaccagcctcagctatcgggcgtgccgaccctgaacatctatcaggacgagaaaggcctcgtaaaagacattctgcaactccatcggtacggacaccagcacggacaccccgacaagcaaccggacagtctccgctccaccatgccgcctcatgccgccggcaacaccgatgcccacgaactttccgcccgcgagatagaagtgctggtgctcatcaccaaagggcttatcaacaaggagattgccgacaaactgaacatcagcctcaccaccgtcatcacccaccgcaagaacattgtggagaaactgggcatcaagtccgtatcgggactgacaatctatgccgtgatgcacggctacatcgatgccgacaggatataaaccggatggcaatccccctgccgccccgcatctcccggcatcataatcctcataaattaggattgcacgggctggagatttcgcgttactttgcaagcgaaacaaaaccagttatgaaacaatataagattattcccctgattctgacgttcctcactgccggtaatgtgtcggcagcagatctggacaccttgaaagtagtagacgtggaagaagtcctcgtcatcgcagcccccaaagaaaaccgcaagctgcgcgaacagcccacagccgtcaccctgctttcgcagcaggacatgcaggcggcacaggtgaactctatcaagaacctgaccggactcgttcccaacatgtacatccccgactacggttcgcgccttacttccgccgtctatatccgcggtatcggttcgcgcatcaacacgccgtccgtagggctgtatgtggacaatatcccctacatcgacaagtccgctttcgacttcgactactccgacatcgaacgcatcgacgtactgcgcggcccgcaaggaacgctgtacggacgcaatgcgatgggcggactgatcaagattcacaccaaatcgcctttctcctatcagggcacggacttgcgcatcggtgcaggcacgcacaatgcctacaacacttcgctgacgcattaccaccgggtgtccgagcgtttcgctttctctaccagcggcttctatgactacgaaggcggcttcttccgcaacgcagcgctggagaataagaagacagacaagagccaatcagccggcggacgcttccgcggcatctacctgccttccgagaactggaaagcagacctgaacgtgagctacgaatacagcgaccaaggcggctatccgtactattataccggcagcgtcaaccccgccgcccaaagcgaagagatgaaatcctacatcggcacaatctccaacaaccgcgaaagcagctactaccgtaacctgctgaatacagggctgaacctcgaatatcaggcgcagcgcttcaccctgagcgccgtaacgggctatcagttcctgaaagaccgcatgttcatcgaccaggattttacggcgaaagacatctatacgctggaacagaagcaacgcatccataccctgagcgaagagattgtgatgaaaagcaaaggcagcagccgctggcaatgggctacgggcgtcttcggcttctaccagtggctgaaaaccgatgctccggtgaccttcagggaagacggcatgggaatgctgggacagatgctgggcagtgtaatcccatccaaaatagaagttcccctgcccatgcccggtatgggaatcaatatcctgccgtccttgcggcccagcaacagcaatctgctcatcaacggtaatttcgacacaccgcttctcaacggagcgttgtttcaccagtctactttccgggacctgttcggtcttacgggattatccttcaccgccggcctgcgcctggattatgagaagatgaagatgacctacgactccggcactgcaatggactatacggtaggtatcaaaggagaaatggtacggggcgggcaggttatcaaagaaataccgatgatgcccgaaacggcgctcaccgtacagtcgcgctaccacggttccatcgacaaggattacctgcaactgctgccgaagtttgcccttcaatacgacttcaagaacaatcggggcaacgtctatgcaaccgtgagcaagggctaccgttcgggcggatacaacatccagatgttctccgacctgttgcagtccagcctgaaaaacgacatgatgcggcagacaaaagaggagattctaaaagccgtagagggttctcccagcgcatcctacaaagaccttatcaacgaaatgttccccgacgcaggcgagaatcccgacacccgctccgccaccgaatacaaaccggagcaaacctggaactacgaaatcggaactcacctgaatcttttcaataaccgtctgcgtaccgatgccgcactcttctggctggagacgcgcgaccagcaaatctcacgctttgcaggagcaagcggcttgggacgcgaaacggtgaatgcaggcaaaagccgcagcctcggcgccgaactgtctctgactgccgccattactgccgacttcacgctgaacaccagctacggctatacgtatgccacctttaaggactacgtaaccaatgcccgcgtcaacggacagcttcaggaaatcagctacaacggcaactacgtgcctttcgttcccaaacacacgctgaccgtaggcggacagtacattttccgcatcaacccgggatattggctggagcgcatccaactgaatgccggatacaccggtgcgggacgtgtgtactggacggaagagaacaccgtcagccaatcattctacggcacactgaacggacgcatcagtttccagaaaggccgcggacagatagacttctgggtgcgcaatgcactggacaaggattacgccgccttctatttcgaaagcatgggcaacggatttatgcagaaaggacgtcccatccaggccggaatagaactgcgttgcagattttagcaaacagagtttgccgacttttacaagcaggtaaatcagaattgtaagcctcttaatataaaccggtttcgtgtaccaaagtaataccccgctttggtacacgaaataccaaccgttggtacgggagctaccaagcattggtacgtgaagtaccacactatggtacgcggactaccaagcgttggtacacggagtaccaactgccggtagccgaggtacctccctttggaatgcgaagtaccgccagccggtaccggcaaataacctattcgttgattgccccgcaatgcgggcaaacccctttcgcccctattttctgtccgcaattgccgcagcgatagcgggatgcagccagtgacgaacgcagtttcctgaagaatacccacacaaatacggctataaacagataaccgatgtatatatgggtagtcagtataaagaagaaataacagaaaatgcaacaggaagccagccccaacagatagaacacagccgcttccggactcagttggcggaacaaatcgtcgagcaccgccagcagtacgatgacaaacagccaaaggctcatcaggaaaacggatagcacgaacggcactttaaacggtgagagtgtggggttgaaataaaaatgctgccacgtctccggcacaaacacctgcatcgactcgtacaccgtggcactgaacgccagcaacagacacagcaacaacggatatacactgtctatatcattgaagtagaccatttgcaactgcttccgccggaacgcgcgaaacagccatgccgccacaaacagcgcaaaaataacaatgaaataggaagcatgcgtatcgctgaacaggtaaatggcctgcgagatactgtccgtaggcacaaacgcccggatcatgtccttttcccgaagccagccttgcacttcctgagaatgggcgagcttgacccatacgctgtccacactgtccgtcgggtgtatggcaaactccgccaccaccaccctgtctcccttgtacagtgtattatagcagtcctttacaggcaggcaggctatcgtcaccgaatcttcctgcacttccagattcgtgttccacgtatagtgacgctcgtacagataagccagcgaatcgcgggtctttgcccccagtttcccgtcttccaggtccggacggggataatggcaagaagaaccgagaataaggtataaaatataaaatatgaaatttaagtataaggtatgaggcataaggtataaagagcgggacgcacgttgtacggtgacgctgtgtttacggctgtttatgtttgtttcttctttcttcatattatatactttgggcattcattctcaatcatcttcactatccgttatgcgtattcacccataccttatacttcattctttataccgtatgctttatacgtaagcttcatccttggcttttaactgctgactttcatttggcagttcttgcagtcgaaagtgaggcggaaacgtttaccgtctgttcctaccaggtagtagggttcccggtacggggaatgtcccttttgatgtgtaggacaccagcccatgctgtaacgcaggcaatgtttgcagaacatgagtacagcttcgggcacggcctgcttctcgtatgccggttctacggaagctactccgtgagcctgataaaagctgcgggcggcggtattcatcacattgcccagataggtcagggacgttgccgggaaacggtggcgggtgggtttccacacgtgcaactcacgacggtaagtaatgcggcgggcggcagtcagcttgtctatcgcctggcgacgccagtcggctatcaccgaggcgggtatgaaccagttctgcgacaggttgattgcaatggcgggagctgttgttgccgaggggctgtccgtgccgccgagaggcatgacctcgaaaggagtattccccaatttgccgagttgggtacgcaggttctccgattgcggagtacgcgcaagttcttttggataagggaaagacaaggttatgcggttgccgtcttcgtccgccgctgtcagggcaaagcccgaaggggtatctgccagctcccatccaacgccgattttacgttcggcggacttgcgggcaaggatgcgctcaaattcctggtcgaaattgcggaaaagacgggtgcgcggtttgatacggggcacatcgcctgccggatacagcttgttgccatccacccgattgatacggaaaccttgcaaacgcccctgttcatcgagaaagcagacaccgtctccgttatggaaaggtttcaccccggcaacggtaaggtaattgccgcgctgctctttcatcgtacccatctcctcgcccagggacttcggcgtatcgaaagaggagatttcccggtcgcgaccctgcaggaagtaatgggtgaagccacggctgaaactcttgtccaactggggcgtgaagtcgaaacggcaagtacccgaagaagcacgtacgtactccttgcgacgggcgaagatggcatccagcttgctgcgataggcagccgtaacgttcttcacataggaaacgtccttcaaccgcccttctatcttgagggaagaggcgccggcatccagcaggtcttccagcacttcgctttggttcaggtctttcaaagagagcaggtgcttgtcgcggacgattgttttcccgtcggcatctaccagactgaacggcaggcggcagaactgggcacactctccccggttggcgcttctgccgaaacatgcctgactgacgtagcactggccgctgtagcttacacaaagcgcaccgtgcacaaacacttccaaaggcgtttccggacaagcctcgtggattcggcgtatctcctgcaatgacagctcgcgcgccagcactacctgacgaaaacctgcatccgccaggaaacgtactttctccggtgtacggttgtccatctgcgtactgccgtgcagggggatgggcggcaggttcagacgggtaattcccatatcctgcactatcagggcgtctacaccgatgcggtacagttcccaaatcatcttttccgtttcggcaagctcctcttctttcagaatggtattgaccgtaacgtaaatgcgtacgttgtacaaatgggcatacgccaccaaagcggctatatcttccaaagaattgaccgcagccgcacgtgcgccgaacttcggtgcgcctatatataccgcatccgcaccatgattgactgcttcaataccgcactccagattcttggcgggggccaatagttctatttttcgttgcttcatcatatttctttcaccacagaaaggggcacaagaccccactgagttttcggagttcttatttaatttcttcaatattgaacggggtttcctgatatacaaagtagttcagccagttggagaacagcaggttggcatgcgcccgccaccgtaccgatacgcctttgtccgggttgtcgtccacatagtaattgcggggcatctcaataggcaatcccttagccaggtcgcggcggtattccgtatcgagcgtcaggggggaatattcagaatgaccggttacgaaaaactcgcgcccgttacgtgccattaccatatatacccctgcctcttccgattccgagagcagggtcagtccgggaactttcagaatatcttccttgcggacttccgtgtggcggctgtggggaacataaaacacatcgtcaaaaccacggaaaatgggatacagaggctgcaaggtgcgatgtgcgaatatgccgaacattttcgcgtccagcggatacttgggcacaccgtaatggtggtagagtccggcttgcgccgcccagcagatataaagcgtggacgtaacgtgcgtacgcgcccaatcgaatatttcggttatctcgtcccagtaggtcacttcctcaaagtccatctgctccacaggggctccggtaataatcataccgtcgtacttctcgtcacgcatcttgtcgaaatccgtatagaaagctttcatatgctctatcggagtattctttgaggtgtggctcttgattttcatgaacgaaatctccacctgcaacggagtattggagagcagacgcaccaaatcggtctccgtcgtaatcttcaacggcatcagattcaatatgacaatccgcagcggacggatgtcctgccgggttgcccgtgaattgtcaatgacgaatatgttttcctctttcagcagctctatcgcgggaagtttatcgggtaaatttaaaggcataagctctgttctacggtttaactaattactgtttacgattttagcgtgtaaagttagataaaaaatcagagcggtataaataaattgcggaagtttttgttgaattaaagcaggcaatacaaaatgattcgatattatttcagtaaaatcccactgtttatttctttcggaactttcaattgtcggataaccgtatacttgagtacaatcaatctatcaggttataaaacgccttcattagatgctgtatttccatattctatatttttcaaatagttcattgaaaagaagataatcttgtgaattgtactacctttgtggctgaaactcaaagcatcaattacataatggcgaaaatcatcgttcaaaacacgcagattaatgttctcaattttaaggaacaagattatatatcccttaccgacatggcttccgccaaagaaggggacagcagagcggcagacgtaattaaaaattggataagaagccgttatacaattgaatttcttggcacatgggaaatcatccataatcctaattttaaagtggtcgaattcgaccactttagaaagagtgccggattgccatcttttgtattaagtgcttccgaatggatagagcagactaatgcaatcggtatcatcgttaaaaaaggacgctacggcgggacgtacgcccataaggatattgcatttgaattcggttctgcaatcagcgtacctttcaaactctaccttattgaagagtttcaacggttaaagactgaagagcaacagcaactcggttggtcagcaaagcgtgaattatcgaaaatcaactatcgcatacacactgatgccataaaacaaaaccttattccgcaggaagtcacatcggtacaagcaagtattatttacgccaatgaagccgatgtgctgaatgtagccatgttcggcatgacagcaaaacaatggcgggaagccaatcccgaactgaaaggtaatattcgtgattatgccactattaatgaacttatctgtttgtcgaatatggaaaacctcaatgcagtatttatcgaacagagtatgacacaaagagaacgtctcgttaaactaaaccaaatagccattcatcaaatgaatatattgggaaacggtgatgaagataaccgtaagttattgaaataaatcactacgcattgctctgcgctgtaactcatcacacatttattttaatttgagcgattatttgtgtgattattccaaagatttagtatacttttacatccttgtttttatttagatatatgtaaagagaagaaaaagcaccaagctatcaagcgtgataactgactaatagaaatctgaaagcgtaaactactttctcataacatttacggttctgcccaatctgatatatcgacacgtaagtttttaagtacgaaccaaaggcgaagatgttttcgtcttataaaactactataacatgaatatcatgagaaacgctttcaaaagggcaaattatgtgttatgcctgctccttgccttatcgggtacatcttgtatcaacaggctaaatgatgaaatcaaagagggcagtatcctcatctccttttcctttgaagcaagtaaagccgctaccaaagtaactaaaaacactttcgacataggagacagaagcggtatctttgccatgctgacaggcaattccctggaccagcagcgatacatcgacaacctgcttctggaatgtagcgacaacagcaaactgatatccaagaaagaagtgtattatccggaaggagatgccacgctggacttcatcagctactatccgtatcaggaagaaaacgtgtccaaaggaagctcactgctggacgtcacagtacaagcagaccagaacaagaccgccaattacagcttatccaacttcatgaccgcccgcatcgggaacgtacccaacagcgagaaaaccgtaaagctggaatacaagcaccggtttgccaaaataaagttagttcttataccccaagaaggtgaagatacggacgagatgctcaaggccaaccccagaatcatagctaccggtttcaggacacaagccgtatatgacctgcaatcggacaagctttcctcggttgacgatgcgagcgaaacggatatcattcctttcggcacatggaagaaagagggtaatacgctgtccggtaaagagcttattgtaattccgcaaacacactccgacggcggacaggcttttaccctggaatggaacggaaaaatctatacctgccctctcccgtcggccaccattgaggaggacacggaactggagatttgcatcaacgcactgcaaagcacaagtgcaaccctcaccggagttatcgccaacatcaaggaatgggagctcagcgaacaaggagagagcgaaaaccgatacgaaatcactgccgtacacacagcctcgctgtcattcagcacgtctgatatctacaggatataccatcaaggaaagcccgtggcagaagtatgccgggagtatctttacactgcccccgccgatgctgttgctactaaagcgattgtagcctattccgtacaggacaatgaacagacggacttgacaaatggaatcgttttacaactaccggacaaaaccgccacgacacatggcggtaaagtaagttggaatgaagcggacaactcgctgacctacattagcggccactcccggcctatcgaaaaattctacatagacgaaaacagaaagatagtaacggaaaagcctgccacaccagcactggctatcaacgtcagcagctacgtaatcagagatatacggaacggtatattgcacacctaccccatcgtgaaaataggcgcacaatattggatgaaagaggatttacagacggcccattataatgacagcaagagtatgcccctcagaaaagctttgggagatggcgagggctacctcaaatgggcgggcaccaactcccatttttacaacggcgaggccgtccttaccgggaaattggctccgttggattggagattgccaacagaaaacgattggaacagactgaaagaatacataggagagaatgcttccgcactgaaaaaggcagatacctggagctcggatgtttattccgcaaccaatgaaaccggattctgcattcaacccgcagggctgctgttggaaagggaaaacaagacggccttggtaaacgcaaactcatcgaccgcctattggctatatgacggcacacaaaagcaattggacaaagtcgtaatgtttgcgaacagcaataacgacatcgccttaaagaacgccgtcaaaccggaaggcaaagattattataatgcgttttccatccgttgcataaaagaataacctgctaaaaaagcatttctcatttctttttcgtatttttgttcccaatgtgcaggattgtgcaggattttgccaattagacaaagacaacggaaaagaaatgagagtaatcgatctgataaacagtaacgaaaaaacagctttttcttttgaaatattgccccctctgaaaggtacaggcatcgaaaagttgtacgaaacaatagatacattacgggagttcgaccctaaatacatcaatatcaccacacaccgcagcgagtacgtgtacaaagacctcggcaacgggctgttccagcgcaaccgtctccgtcgccgtccgggaaccgtatccgtagccgcagccatccagaataaatacaacataacggtggtgccgcatattctttgcagcggtttcagccgtgaggataccgaatatgtattgctcgacctgcaattcctgaacatcacagaccttttggtgttacgcggagacaaggcaaaacacgagtcggtattcactcccgaaaagaacggttatcatcatgccgttgaattgcaggaacagattaaccaattcaataagggcatctttgtagacggctccgagatgaaagtcaccaatactcctttctcatacggagtggcctgttatccggagaaacacgaagaagcgcccaacatcgatacggacatttattggctgaaaaagaaaatggaaaccggagcggaatatgccgttacccaattgttctatgacaaccggaaatacttcgatttcgtagaacgcgcccgcaaagccggagttaccatccccattataccgggcatcaagccgttcaagaagctttcgcaactcagcatgatacccaaaacatttaaagtagacctgcccgaagaactgacaaacgaaatcttgaaatgcaagactgatgccgaagcgcaacaggtaggtatcgaatggtgcgtgcagcaatgcaaggaactgatgaagcaccatattcccagcatccatttctattccataggtgcagtggacagcatcaaggaagtagccaaacagatttattaaccaaataccgacaccgtgttttttaaagatgtaataggccaggatacagccaaacaacaattgatacaagaggtgcgggaaggacgtattcctcacgcgcaactgttctgcggaccggcaggagtaggcaaacttccgctggctatggcttatgcccgttacatctgctgtccgaaccgcacggagaccgatgcctgcggcacgtgtccttcgtgtgtgaagtggaataaactggtgcatccggacgtacacttcgtattccccatcgtgaaaagtgccaaggggaagaaagaagtttgcgatgactacatagccgactggcggcatcttgtactaagcaacccctatttctcactgaatcattggctgaatgaaatgggagcggaaaacggacaagcgattatctacgcaaaggaaagcgatgaaatcacccgtaagctcagtttgaaatccagcgaaggcggatacaaggtaaccattgtatggctgcctgaaaagctgcacgaggtctgcgccaataaattgctgaaactgctggaagagccgcctgagaagaccatcttcctgttggtttccgaagcacccgaaatgatattgtctaccatactcagccgtacacaacgtttcaacatccgcaaaatagatgaggcaagcatggcaaacgcgctgcaacaaaagtacggcgtgcaaccggcggacagccagaccatagcccatctggcaaacggaaacttcatcaaggcgttggaaacaatccacctgaatgaagagaatgagttgtttttcaatctgttcgtcagcctgatgcgcctctcctatcaacggaaaatacgggaaatgaagcaatggagcgaacaactcgcggctatggggcgcgaacgccaaaagaattttctggaatactgccagcgcatgatacgggaaaatttcatctataacctgcatcggaaagagatgaactacatgaccctgcccgaacagaacttcgctacccggtttgccccgtttgtcaacgaacggaatgttatgggtattatggatgaactcagcgaagcgcaagtgcacattgaacagaatgtgaatgcccgtatggtattctttgatttttcactgaaaatgattgttctgttaaaacaatagaagaatccttttcaactaacatataacatagtaaatcatcaaaataacagatagaatgatggaatttaaactacataacggaagcggcggtctctgctgcaaaagctgcggcaggcaagacaagcaactgaacacttacgactggcttgccgacattcccggcaatgcagaggaatcggacatggtggaagttcagttcaaaaatacccgcaagggttatttccgcaacagcaacaaaattcctttggaaaaaggcgatatagtagccgtggaagctactcccggacatgatataggcgtagtaacccttaccgggcggcttgtaccgctacagatgcgtaaggcaaatatcaagtcggaagcggatatcaagcgcatctaccgcaaagccaaaccggtggatatggacaagtataacgaagcgaaagcgcgtgaacacagcacgatgatacgtgcccgccagatcgctcttgacctcaacctcaatatgaaaatcggggatgtggaatatcagggagacggcaacaaagcaatcttctactacattgccgatgaacgcgtagacttccgccaactgattaaggtgcttgccgacgctttccatgtacgcatcgaaatgaagcagatcggtgcacgtcaggaagccggccgtatcggcggtatcggaccttgcggccgtgagttgtgttgcgctacctggatgacatcgtttgtttccgtttcgaccagcgccgcccgctaccaggatatttcactgaatccgcaaaagcttgccggacaatgcgccaaactgaaatgctgcctcaactacgaagtggactgttacgtagaagcacaaaaacgcctgccttccaaagaaatcgaattggaaaccaaagacggcgtattctatttcttcaaagccgacattctcagcaaccagataacttactccaccgacaagagtatccctgccaatctggttactatcagcggaagacgcgcctttgaagttatcggtctgaataaaaggggcatcaaaccggagagcctgttggaagagacacatcgcaccgaacccaagaaaccggtagacctgctggaacaggaaagcctgacccgcttcgaccgtaaccgcaagaacaagaacggcggagacggcaacaatggaaacggtaatggaaataacggcggcaaccggaataaaaagaagaaaaagactcccaataaccgaccgcaaggcggagaacagtctgccgctccgcaacaacaagagcagcccagacagcagggagacgaaaaacggccgcaaggaaatgaaagacgttcacaacggaatagcaacaaccgtaaacgtcctcacaacaacaagcccaaacctcagggagataaacctgctcaaaatgacaagcctgctcaagaataagacaaagactctgagatatatcatactgctgtttatcgtaagcgcattaggcgcttgcgataaacagactgtatatcatgcattccaatccattccgcaagagggttggaaacgacaggacacactccttttcaatgtcgctgtgcccgattcgcaaacttactacaaactgatagtagaaattagaaaccgcagcacttacccttaccaaaacatcaacttatccgtctgctatgacagtccggaattgaaaaagctacagacagatacattgacagccgtcttagccgataaagaaggcatatggaaaggagatggctggggcggtttataccagtctgcatttcccgcaggaaacatcaagatagggaaacccggtgactaccttttcaaagtagcttatacattacccgacagcctcctgcccggcatcaatgatgtgggaatcaaattacaacgataatattataccaaccttctatttctccccgcatcaatacgcaggaatataaacagcagtatcgtaaagccccataacgaagaccccccatagctgaagaaaggcaacggaataccgataacaggcgtcaatccgagtaccatcccgatgtttatgaaaagatgaaacagaaaaatactcagcaccgaatacccgtataccctgccaaatgcggactgctgccgctctgccaacgctatcagacgaagtatcaaagccaggaacaagagtaatacagccgtcgaaccgataaagccttcttcttcgcctacggtacagaatatgaaatccgtgtcctgttcgggaacatatttaagtttggtctgtgtaccgttcaaaaagcctttcccagtcaagccgcccgaaccgatagcaatcttcgattgatttacgttatatcccgctcctgccaagtcctcttccatgcccaacagaaccttaatgcgaatctgctggtgaggttccaatactttattgaaaaaatagtcgctggagtagagaaaacctatcgaacctatggcaaacaaaccaataagaaaataactccaatggcgttcactcaaagcaaggaagaataaataacatgttacaaccacacacaatccccattgcacccataccagattaaaaggggttatatattccgaaaccagataagcgacaagcaatacgataaaagaaccgacgatgatattccgaaccggctcccatttcttcttatatacccataccattccaccggcaaagagcaaaatcatcgacagtaccacaaactctccgataggtgttggagtatctgcaataaagacttgatcaaaacggatacccaccacaaaatataccacagcgcaaataccggagaaaagcactactccgggcataccttcacgataaagcatcaggaagaaagccatataaaccaatgcagaccccgtttcccgctgaagaataatcagcgtcatcggcagaagaataaggaaagccagcatcaacgcgctcttccagctttttatagtgaacgaataggcgctcatatacttggccaacgccaatgccgtggcaaacttggcaaattcagccggttgtagactgacaggccccaaaatcagccaagaccgtgagcctttggtatcaggagcgataaaaatagtgacaaccaacaagagaataagtcctatatatataatgtaagagaacatatcataaagcgtatcttccagcatcagcagaataaatcccaacccgaatgagcagacaatccacatgaactgcttgccggcacgggtagagaaatcaagaaaatcacggtcaccatagtcgtaacttgccccgcaaatactgaaccagccgaatacaatcaacatcaggtagattataatcgtcacccaatccaatgatttccatatactgtctcttcttaccatttatactgctactgtttgactgtttattacctttcttcgtctccgtacagaattacgcggttgctgaattcctccgcacgtatctcattctccggcgataacttgccatgcaagtactgatccatcatcatcgcaccgatagggacgccgtaggttgcaccaaaaccgccattttccacatacaccgcaatagcaatcttaggatcattcatcggagcgaatcccatgaacaccgaatggtctttaccgcgattttgtgccgtaccggttttgccgcatgcctctacacccggcaggattgtgccgaccatacggcaggttgcactacccgtactacctgtaacagcggcacgcatcccctccacaacttcatcgtaatattcccggtcgattgacgtgacacggggggtacggtagatactgtccagttcattatcctgtatctcctttacaacatgcggagtaatgaaatgcccccggttggcaatggttgcacccaaattggctatctgcaacggggtcgcaagaatttctccctgtccgatagcgatactgattaccgtaagtccgttccaagagccccgatatgctttatcataaaacttagcgttaggaatcaagccgcgctgctctccgggaaggtccgtaccaaggcgatagccgaatccctgcgacaccatatggtctttccatacggtaatggcattttgcggagaaccgtacttcttgtcgctgaacatacggaacagcccccaacaaaaataagagttgcacgaagtggctattgccggaaccaaaggcaaaggagaaccgtgcccgtgacagcctacatgcaaacttccataattgaaaccgtgtgcacaagggaaagtaggataatcttcatggattattccttcctgcaaaaatgtcaatgcctgcgcagtcttgaaagtagagcccggcggatacgctcccatgattgcgcggttcaggagaggtttccgcttgtctctttgcaacatccggtgattctttccacgctggcgtccaatcatcaagtgaggatcgaaagtaggagaagaaaccatacagagtatctctcccgtagccggttcaatggctacgatagctccgattttatgctgcaacaaacgctcacctaacctctgcaactcaatatcgatacctaaagtcaggttcttaccgggcacagagggacggtcgagcttcccatccatataatgcccctgaatacgtccatgcgcatcacgaagcagaatctccacccctttttcgccacgaagatacttttcataagatttctcgataccttgtttgcctatataatctccgcggatataataattatccgcctcaatatctttctttgacacttcacctatatcccccaacgcatgtccggcagcatcgtaagtatattgccggatagtacgccgctggatgtagaaaccgggaaacttgaatagtttctcctgaaacacaccgcactcttctgccgagagttgcgtcataaacacctgatgcgtatatttggaataaccgggattcatccaacggttctttacatccttcatccgcttctggaactgctcgaacgtgatgttcaacgcacggcataaatccaacgtatcgagctgcgtcacttcacgaggcacaaacgtgatatcgtatgccggctggttaaaaaccagcagtttaccgttacggtcatagatagctccacgcgaaggatattgaatcttattcaaaaaggcattgctgtccgcattcttcttgtaatcatccgtcatgatttgcaagtcgaacaggcgaatcacgtagataaggacaatgacgacagccgccatgcctatcacatattttcgtttctccagcgtataatccttcattcaatcacaacatatgagttataaatacaagtaacataacttgcaacctctttttacttcttccgtatgccctctactgccattatacaagctacagtcagcaaagtgcttgttacaattctcagcaataacgcacctatgtggacaaaagaaaagaattcaagagtaagcagcatcccgtgatgcaccaagacactggcaaccaagtatttcaaaaaaggagagattcccattgtacggactgccggaaccaatgtatccagcgtatcgcgaggcacgaacaagcgtaagaatgtagggcgcaaaaaggctaaaagcaccgtagccgccgcattcattcccggagtatcggaaaggatatcaaccgccagtccaagaaaaaaagcccatagcatcaatgcattacggggtacatccgactcaaacttcaatatcatatatatatataaaaacggagtggcatatcctgcaatatgcacattgttcagtatcagcacctgcaataataccagaccgacaaaccaccctatcttatgcaaataattgattatcatttttctccttctttttccagcatattctgttcttcctgtccgctgcgcgaaatgacacgcacattgctcaccttaccgaaatccgtagctaactttatcttcaacagatatgaaagtccgtcatgggaatcggacatatcatcgaccgttcctaccataactccttcaggaaatactgtggaatagccgctagtcaccaccgtatcacccagattaaattccgcatgacggggcaagtctttcaaataagcaaagcgcgaatctccaccttcccacttcaaatagccgaagtactcactgcccacaatcttgcagctgatactcgacttgctgttcagcaacggaataaccagcgaatagcggggagaagtcttatatacgatacctaccactccatttgcatccactacccccatttccggacgaataccatctgacgagccacggtccaatgttatataattatctgccttattcagactgttctttataacattcgccttgaatatgcggtaatcatccggagcaaggcgcgccatactatatagttttacggaatccaagccctgctcctgcaggcttttttccagaaaagctacccgttgttccagccacatattccggtcgagcaagtcctcattgaccgatttcaaatggaagtaagaactgatgccgcccgaaatctcataaactttcccggctactccgtttgccgaagtaaaatacacgctctgctgataatggttgaaacggaacaataaaacaaaactggtaacctctaacagaagaaagaggaaccagtaattgtatttaataagaaagttcagtagattccgcatacctatctcatcaggaatgagaagcggtcgacattcttcagtgcaacgcctgtacctttggcaacggcatgcaaaggatcttccgcaatgtggaacggtatgttgattttatcggtcagacgcttatccagtccgcgaagcaaagcaccgccacctgccagatagataccgttgtgcacaatatcggcatacaattcgggcggcgtattctccaatgcacttagaatagcagtctcaatcttagaaatggacttctccagacagtgtgccacttcctgatagcatacgggaacctccataggaagcgccgtaatacggttcggaccatgaacgatataatcttcgggagcatcctcgcccagttcggtcagggctgcacctacgttaatcttgatacgttctgccatacgctcgctgaccttcacattgtgctggcggctcatatactcctgaatatcggcagtgaggtcatcaccggcaatacggatggagttgttggaaacgataccacccagcgaaataacggcaatttccgtagaaccgccgcctatatcaacaatcatattaccctccggcgcttccacatcgatgccgataccgatagcggcagccatcggctcgaatatcaggtaaacgtcacgtccgccggcatgctcggcagagtcgcgcacggcacgcaactctacttccgtactgcccgaaggaacgcctattaccatacggagcgaaggggaaaacagacggtttcgattgttcaccatcttgataagtccgcgtatcatctgctcgcaggcatagaagtcggcaatcacaccgtcgcgaagagggcggatagtacgtatgttctcatgggtcttttcgtgcatcagctttgctttttcacccacggcaatcatcttgtctgtacgacggtccaacgccaccaccgaaggctcgtccactactatcttgccatttgtggtaatgatagtattggcagtgccaaggtccatcgctatttcttgtgtaaaagagaataatcccatgtaaattaaaaattgagaattaaaaattaaaaaatatcactcatatcaggaactgagaactaaaaagcaggagaaagcatcattcctcaattttcaattctcaattctcaatttaatcagtgtttaaagtgacggaaccctgttatcaccattgcgatgccatgttcattgcaataattgaaagagagctcgtccttaatgcttccacccggttggataacggccgtaacaccttcattacctgcaatctccacgcagtcggggaaggggaagaaagcatcacttgccattacggcaccgttcagatcaaaaccaaagttcttggctttttcaatagcctgcttcaaagcgtctacacggctggtctgtcccacaccgcttgccagcagttgcttgcctttagccagtacgatagcattggacttgctgttcttcacaatcttgtttgcgaaaagcatatcttcaacttcctccgcagtcggagccttggtcgttacggttttcaaatcttcgggagtttccaccttcaggtcacggtcttgcaccagcacaccgttcagcaaagagcggaactgcttcttgggcagagcagcctgcttgcgcaccagaatgatgcggttcttcttctgaccgagaatttccagtgcatccacatcataatcgggagctatgataacttcaaagaatatcttgttgatttcctcggcagcaaccttgtctatcacggcatttgtgatgagcacaccgccgaatgcggataccggatcgccggcaagcgcgtctgtccaagcttccaatactgtgggacgtgaagccagaccacaggcattgttatgcttcagtatagcgaaagtagtatctgtgaattcatcaatcaagtcaacggcagcgttgatatcgagcaggttgttataagagatttccttaccgtgtatctggtcgaacatagcatctatgttaccatagaaataacctttctgatgcgggttctcaccataccgcaaagtcttttggttgttggcggactgacggaaagcagacccttcttcgccatcgaaatagttgaagatagccgaatcgtaatgagaagatacggcaaacgcctctttggcaaaccaacggcgttcttcgagtgaagtggtagctccgtgctccatcagcatatcgcgaagaggctggtattgagcctgtgaagcaacgataaccacatcattataatttttggcagcggcacgtatcaaagaaatgccacctatatcaattttctcaataatagccggttcttcggcaccgctggcaacggtggcttcaaacggatacaggtcaacgataacaaggtctatttcgggaatctcatatttctctatctgttgcatgtcttgttccaatccgcgacggcaaaggatacctccgaatatcttcggatgcaaagtcttaacgcgtccacccagaatggaaggatatgtggtaaggtcttccactgccttgcagggataacccaaagattctataaattgacgagttccgccggttgaaaggaactctacaccttcttcatgcagtttggtaatgatttcgtccaaaccttctttgtggtaaacggataccagagctgttttgattcttttagtttcagacatggatttgcgtattaaagtaatgcgtacattttactattcggaatgcaaagttactaattttgtttattcacacatacattcatacacaataaattaggtataattaaaaaaggaactcattattaattccgatacctttgtacaatgatgcagaaaaagtcccgttgaaaaggtatccacacctttccaacgggactgaaatcttttataacaaccgctctgttaccaaatagaaacccgtttgtccaccggcacaaacatcgggtcattctctgttatattgaaagcctcataccaagcgccgatttgcggcaaagcaccgttgacacgccacttacccaatgagtgaacatcgctcttggtacggttcagcacttcttccggacggatattgtttccccatacacctgcataagcaaggaagaaacgctgttcgggagtaagaccattcattacaggcagcaggttggcagccgtagctttcttaaatgcctgataagcaacctgcaaaccaccatgatcagcaatattctcacccaaagtcatacggccgttaccatatacacccggagcaacctcgatactgtcgaacacattcaccatcacctgtgcacgctcatcaaaacgtttggcatcttcctcagtccaccagtctttcaaattgccgtccttatcgtattggcgtccctggtcgtcaaagccgtgcgtcatttcatgaccgattaccactccgatagcgccataattgaaggcatcgtccgcattcatgtcaaagaacggatattgcaaaataccggctgggaagcagatttcattcgttgtaggattataataagcgtttacggtttgcggagtcatcagccattcgtctttatctaccggcttgccggctttagccaccatctctgcatggctccattcgttggcacgctccatattcgcccaatatgaatcatccttgatttccaatgtagaataatctttccatgtatcaggataacctattttcacatggaaagtagccagtttctccaaagctttcactttggtagaatcgcccatccaagcaaggtttttgatgcgttcacccaagctttcctgcaggttcttcaccaaagtcaccatacgttctttggctgcggccgggaaatatttctctacatacatctggcctaccgcttcacccaaagcagaacttacagtactgaccgctctcttccaacgaggttgcatttcctgcgtaccgctcatggtacgttgatagaaatcgaagttctgttcggccatagcatcattcagagtacctgcagcagcatcaatcagtttccattgcaaatagagaccttgttgctcaagaggaagagtatccagaatttctgcagcagccttcagagaagcgggctgacctacgataacttcttgcacatcttttaaatccaaagctgacagataagcatcccaatcaaaagtaggataattcttcttcagttcttccaaactcatcttgttgtaattggcatgcggattacgcaactccgtacgcgaacggaaagctttggcaagacgtgtttccacatccatcaccacttctacgcctttcttggcagcagcctcatcaaaccctgccaattgatacatcttctgtacatgtgcacgaaaagcattgcgtatcttggcagtagcctcatcgttctccaaataatattcgcgctcgcccatgctcaagccggcctgataagactgtacggcattcatgctgctgttcatttcatcagcgcctacgtacaagacattgtaagccacaattccttttttctgcatctctcccagcaatgcataaacctctttccgatccttcaatgcaccgaggcggtcaagttctgctttaatgggagccacaccgtctttgttcagcttcacgctgtccattacgattttatacaaatcaccaactttctgagctacgctgccggcttcgtgctgcgtggcagccagctcctcgatgagtccctgaatctgcttacggttattttccgcaaggatggtaaaagaaccatactgtgaatactcggcaggaatgggattgttcttcatccaaccgccgcaagcgtattggtagaaatccgttccgggcaaggccgttgtgtcgaggttggcaaactgaataccggctgtgagctcagcctgcttcttgccggtgctgcaagcgcctgtcatcagacagaatgctgcaatgggtaaaaaatgaaatactctcatacttatataaaataaatgttattatttccttgcctcttccaactcgcaggaaactgcatcccactcttccatcacactgtccagttgggctttcagtttctgatgctgttcgtagagcgccatatccgaagcgccctccggcgtagccattttagcttcgagaatggaaatggccgcttccgtctgctctatctctgcttcacaatccgctacacggcgttccagcttcttaagccgtttattgagttctttctgttcctcataagaaagttttgcagcggaaggctgtgcaaccgttgccccggcattgccgccggcaaccgttttttccgcagacggtgaggaagacaaagaaggcgatttctgcaaatcattcaggctctctatctgcttcttctgcaggaaatcgtagatacctccgaggtgctccttcaccaatccgccaccgaactcatataccttagtcgcaagaccgtccaaaaagtcacggtcgtgactgacaattatcaccgtaccgtcaaaatcgcggatagcttccttcaacacatccttcgagcgcatgtcgagatgattcgtaggttcatcgagaatcaggaaattcaccggttccagcaacagcttaatcatggcaagacgggtacgctctccgccggaaagcactttcaccttcttgtccgaagcctcgccaccgaacatgaacgctcccaatatatcacgtattttcaaccggatatcccctaccgccacacggtcaatggtatcgaataccgtaagattttcatccagcaactgcgcctgattctgagcaaaatagccaatctgcacgttgtgtcccaaagtaagttttccggtataatccgtaatctcgtccatgatacactttacgagtgtagacttaccctcaccgttcttacctacaaaagccaccttctcaccacggtttatggtgagatttacatcgtggaatatgacatggctaccatacgccttggctacatcttcacaaataacaggatagttaccgctacggctgctgcaaacgaacttcaaccgcagcgcagagttgtcttcctcgtccacttcgatgcgctctatcttctccagttgcttgatacggctctgcacctgcacggctttggtagctttgtagcggaagcgctcgatgaactcttccgtatcctgtatctgtttttgctggttttcataagcgcggagctgctgttcacggcgttccttgcgaagcgtcacaaactcatcgtatttcactttataatcataaatacgtccgcaggttatttcaatagtacgggtagtgacattatttaggaaagcacggtcgtggctgacaagtaccactgcattggcacgggtggagagaaagttctccaaccactggatgctctctatgtcgaggtggttcgtaggttcatcgagcaacaatacgtcgggacggcgcaacaacaacttggcaagttcgatacgcatacgccagccgccggagaactcactcgtagggcggtcgaagtcttcccggcaaaagcccaatccctgaagagtacgctctacctcggcacgataattagtgccgcccatcatcagaaagcgttcgttctcgtgggtaaagcggtctatcagcttctgataatcctcgctgtcataatcggtacgttcggcaagttgctggttcatacgttcgatgtcggcctgcatctcaaagatatgctcaaaggcaagttcagcctcctgcatcacagtacgttcatcgctgagaaccattacctgcggcaagtaaccgatagtacattcgcgggggacggcaacaacaccggaagtgggttgctgaatacctgccagtattttgagcatggtggacttgcccgccccattcttgccgacaagggctatacggtctttcttattaataacgtaagaaacgtcttcaaacagaggagtagcattaaattccaccttcagtccttctacagatatcatagtgtcaatgaattaatcgttcaagactgcaaaggtaacgatattattttttattctcacgcaatcatgcattcaaagcatacaactgcattcatttaaatttcaataaatcccctctttccctttctgtccaaccgatttggaaaacagaaagaaaaagaggggatatttttataaagggaatcgcctgggcgctcctttagaatagattggcgttcttttagaacagcttagccggatattctcccgcatccaccaatgccttaatcttatcgaccacgctctgacggtcttccggataagtcaccccgaaccatttactgttcgtatcaagcacttcaaccgtagcagtaccgtcattaatcagtttatccaccatcaaaggaataaagaattcactcttcaggttctccatattcttcgaatcgctgaggaacgtcttgaagaattcctgactgtaagcgaagtaatcgggagtaaagccccagaaattcatactgaccggagttgtatcgggagtagcagtccactcaccgttatcatcaatatatttcacttcaccgtccatacgctgaattttggtacgttcaacgacagaagtcagcagattatttgcatcagtgctgcaaaggccgcgagacaccgtaccgctttcactcaatgtattgccgatgcggaatcctaccatcgaatatacattcttggagccttcgggaagctcagacaggaacttgcccattacctggaaagaatcacgaccgtagaagtcatcgcaattgataacggcaaacggttcctttatcacatcggcacccatcattacggcatggttggttccccaaggtttggtacggtcggccggacacgtaaatccttcgggaagtgcatccagttcctggaacaccaattcgcacgggatatgaccttcgtatttggatatgattttatcgcggaagtcttgttcaaaatctttacggataacaaaaacgagcttaccgaatccggccttgatagcatcgtaaatagaataatccataatagtttcgccattaggccccagtccgtccaattgcttcaggccaccatagcggctgcccatgccggctgccaataagaataaagttggtttcatattagttattatttaaaaaggttagtgtatcatggttgataacaggcacaaaagtagtaaaatttatatcagaaaaaggaagatttcagtccattcttttccataatcgtacaaaactccgcctcaatggcagatacttctacttttagtttgcttattagccacaattcttcactattgtcagccccaaacccacagtttgccttagaacggataaccgatagcgaaatgcaaggcaagactgtccttgaacttgggaatattatagtatcccgacttaccggtatcatacggatcgtgcaatcctactccacaatccagacggaaaaccagaaagtccatatcataacgcaaaccggctcccgtacccaaagctatctgtttggcaaagttctttaaagtgaactcgccgcctggacgggactcatccttacgcatcagccacacattaccggcatccaagaatacagctccatgcaaatctccgataatgcggaagcggtattcaacattagcttccatacgtatatcacccacatgattgatgaaagaatacttattttccttatccggagcataactgcccggacctatgctacgtgcagaaaaagcacgcacactgttggcgccgccgatatagaactgttcggtataaggagccgccagcgcatttccgtacgaccatatcacgccgccggcaatgcgcgaggcaatcatctggttcttgtctatcttataatgatagcggaattcgctgtttaccttcaggaactgtgcaaaaggaacacccagcagctttttgtccttctccttgaacgactttccgaaaatacgataaatgcacgaagtaaggttaccagccgagctcactgtcgtctgccaccagataggattgcgcacacccggcaaagatgcgttgtcgtaggtgtacatatactcaaagaccggaataaactggtcgcgcaggctgacgtagagtgcaggattctccgcctgcaactccttgaaggcttccgtagggtcgcgaagtacgttgaacgtgagtttgaacggtgtaaaactatgcttgctcgtacgcttcggctggaaatcgtatgtagcgtttccgccaaacgccagcagtttataatacttggcacggttcaactggtcgatgtacagtttgaaaatcgtagtggccggaaagtcatactccttgtcgccaaagcgagggaagaccacgcgcggaaacataagcgaggtagacacccccacttcataactgttcatcagcgaagaacggtctttacccgtctgccactcatacgaaccgtccaactttacattccatgcctcaccgccgccaaacacattgttcttcgttacggtgaacgaagctcccggtccggtttggttattgcttttcatctttacgttgaagtccagttcggcatcataaggcttgtcgagtgccgcatgaatattcacatccagcgtatcgcacacgaatgtcgtatcacgcggggtgtactgcatctcaagataacggaagatgcctacattgttcaagcgctcctgcacgcgggtctggcgataaaggctgtaaaggcgctgcatggagcgtctgcgggaaatacccgtactgtcctgcacctgacgtttctgacgatacgcctgatagttcagccatctgtaaatcatattgggacgtacccgcagcttgtcgtgataatagatacgcaggcctttgtagtcgatactgtcattaggggtctgtccctgcttgccatacagataaaaagctttcttgcctacataaaacggtttctcggcaacggaaggcatgccgggagcaggaaccatgcgcatggcaacatgtccgccgggcactaaggtcgtatccgcctgataagtcagataatcgggacggaaataatagcaccctacattgcgcagcaaagtactgatacgggtacgttctccgtcgaggtcggtcacgttgaactgttctcccggactgataagcgaacggcgccggctcatattcataatgcgcaaggtacgctcactgaaaccgtgataatagaccgtatcgataaaataagggttgcgcatatccaccgtatattgcagctttgctttcaaagaatccttcggatcgatgaacgttttatagctgaccgttccgttaaagtagccgtaatcgcgcaataaattggcggccgccttctgccggatatcgggattgacagtggacatcagtacgggctttgccgcaaagcggttgaatatccacctgccaaagcctttctcatatttcacaaagccattgtaaatccataaccccataggaaaaggtatgcgaatagtggaactacccagcaaagaattgttcggagcagtggcaagcgccgcttcaacctcttccatggcagtctcgcctaccggagtggtactgcggttctcgacaatcatctttttttgtcccgtatacagaatttcaccttccggcaaatgcttggttgtggaacatcctgccagcaacagtatgcccgccatatatactatcagtcgtttcatatcattctacagtttgcttcttctttttcctgaagataaaaagttcgcccaggcggtccattttgcgacgaagcacaagaccgactccggtttccgttatttccccgtcgagcacactctcgtagttcttgtcatagaacacacggacatagcgcgtaccggacgtatcaaggcggtactcaagcgaaatattgtcgataaacgattccgcatcattcgtggcattggcgccggttgtcaccttaccgccgatgacaatctgcacacggtcgttgaaaagacgctgcgaatagcggaagctataatccgtctgcttgtcacccgtttcggctgacgtacggtcttccatacccatagtgaaacttgcgttgatgctttggaaagccgagcctgccaatgagttgatctgactttggataacactgttcaaagcactgcccatagacaatccgccgcctttgacaccgctgttcatataaacaccggtcgccagcatggcaatggcctgtttgctgcgctcctcggctcccatagcctgcaactcattctcaatggtggcatcatccggcgccgttatatcgaaaataagttcgggagcgtcaaggcgattctttatagctatggacacatcgaaattcaccacgcgcgaaccaccgtcatcaccatcggctaccgaagcgcgcatacgctccgtcgctttcaggttcagcgtcgggttcatcgggtcgcctcgccagtccacataactgccgttgttaatctggaattccttcaacggaatgataggaagcgaatacttcataattccgcccgaaagcgtataacgtccggtaaggcttatatcgccttgcggagtatactgcatgttcaaatctccgccgccttccaattcaatgaatttactgcggtcgggacttaaatcggcgcgcaggcgcacggcattgtcgatatgtacggacataatcatatccataccgcccaaagacatggcgggagcctcatcagtgcccaccgaagccgtatcggcaaaagaagtaaaggttactaaaccctcaagacggtcttccaccgtcaacggtgagtccgtcagtacataggtaacatccgtattgcccagcaggttcatgttaccgcgcatggtcagggcatccaaaggccctcgtaccgtagcgttcaaatcgacaaatatcttgccgtagataagactttcgcgggtgcgcggcgcatccagcagcgtatagttctccgccagcaacttcaagtccgccgtaggacgttccaaattgcggaagtccaccttgccgttaatggtaaacggattcttgctggtggtataaatggcaaacttgtcaaatatcagttggttatccctaatctgtacgggacggtcgtcaaaccagtagcgggcccctgcctgacgggcatataccgatacgctgtccagcgtgatatctccgtgcatcctgggtttctccaacggtccgtagatgtacatcccgccatcgaggtcgccggtaaaggacatcatttggtcgggcacaaaagcattggcaatcttcatcgggaagtgttcaaaagaggtagtcacttccagcgtgtcctttccgttcttctttgtcagtatgccgtcggcagtcatcacttcccggttgtcataactgaaatatgtattcagataatgcgtagcgcccttatcgcccggcagccatgtggctcccataccgatgtctcctacatgctgccgctcataggtcagttcatcgatattggcttcggctgaaacctgcaaggaagtaggggtctgtatatactgcgcctcggcagagaacaagccggtgagacggggcatataaggaagcacctcgctcagttcgcccagttggaaacggctcaactccacgttcatattctgcaatgaaatgctgtcgttcttgtccgactgcatacggaagcccaaaccgttgtcactatccatatcgatattggcatagacgcgcatgttgttatgcagatatatccaattgctgttgtctacgaaatggaacttacggtatgcgataaccggttcggcaggcgtcagattaagcaatactccgttgcctttgccatgtccctccgtcagcgggcgggcattgacgccgaacagcactcccgtctgtccttttccgtccacataattcacggtcagttcggcatcttcactgcgaatctcaccggtcagcgtactgcggaatacgaactgcggattcttcggtccgttaatcaccccgctttgcagcatcatccgggaagtatcctgcttcacggcaaagaaaaccgtatcgagctgcaacgagtccacacgcaatccgtgaacggcggtccgtccgttgatgccccgtgccggcgtacttccgaaacgaagggtgaagtcattgaaacttatgttttttgttttcaggaaatagctgaccggattggcctgcccagccgtcaacttcatgcccgccgagggcaatacctgccgcaaggcggcatggtcaaggcgtctttcctctatctgtttcgtcagaatggctacgaacttgtccgactgccccaacaactcctccaacgtgctgcgggcacggaactgcaaatccatatcgccggcatccatccgcaacttaatggaatcgcgacgcgcttccgctcccagattgaacgcaacgggatgttccaaaggttcggatgcgattcccagattatacaagtccagttcctctactttcatgttcagtctgccgtccatatatttacggtcgagacgaaggtcagcttcagactgcatcttcaacagttcattatcgctcgtcaaccgtacagaagctaccgcagatttcaaccccgcattcaggttcacacccgacagattccagcgagcatattgcagttcgtccagtttggcttccacaagagccgtcgtctgacgggaagtcatatccactcccctgcctttggcggcaacatgcgcagtaagtgcataaacagaatctttgggcaggaaatgatgaagctgcaaggcatctatggcgaggtctgcatgatagacctcggtagacaggttgtaagcggcatccagattcagactgcctttgccctcctgcactttgagcagggcattgcattgaggcccgtcgagcccgagacgcgctacgaggttcatactgtcgggcacaacgatagagccgtcgggagtgaccccggtaagcccggtgaggaaattaaggtcttgcgtctgcatctcaaaatcaagccctccgctacgcttcaggctatccgtaaggttccacaactcaccgccgccgctcaatgagaaagcgccgggaagttcggccgtgaaacgggaaatctgcatctgtttcagattgccttccgtaccggcatggattaccaacgggcggaaaggataagcctctttaaaagtttcgggcagtccgccggcaaagagcaatacatcctgcttgccgatattggcgttaaagcgggcggacaactgtccggtagtgggtatatcgacaagtttccaataggtctgcgccgtcaggttcatctcgctgtgcggggtcttgagctgcaaatagggaacacggataacggctgagtcggcaaagaggcgtccggtcagggaagtcaccgtcagcccagaacggtcgtacatggagaactctcggataacggcattcatgtcgcggccgcaggtcatcaccgaatctatgccgatacggatatcgcgcaatgcgatgtgcgaagcgtcaaagccctcggcaggaacggctgtgcccgtatcataattcacggaagtccccgtaagggcaaacttacgccagccatagaactgccgcttgaggtcggcttcggcatcctctatgcttgcatccccgatagtggctgccagcgacatggagtcgagcggcatctgcaaatccaccgacacattcttcagtttcaggctatgcaatgctacgcgccagttcaaggcggtttcggtggtatcctccggagtttcggtagtgtcggcaagcatcacctgcacgtgggtatcgctcagttccacccggttcagtacggcatcctctttattcaggtctatgccgtgactggcaagaaagaaccgtccgagcgtaccttttatgcgcatgccttccagcaggccggaagagtttacggccacccgttgcaaagtgatgtcatccacctctacccttcctttcaataagggccatgcctgtacgcggacattcaggcttccgaggttcagcaaggtatcggggtgttggatatcagtagtatcgcttcccggctgcactacctgaacaccgcgtacaagcaggttcaacggaaaacgaaggtctatccgctctacggagatattcatgcccgtagcatccgatgctattgccgtggcctgcttccgtataaaattctgtacgggcggcacgtaaagcaatatcatcaatattacaaataggataataggagtaagaagcacccaaagtgcccctcttaaccattttcttctcattggaacgtcaagctgtcatcgattaattcgtacaaagtaaacaattaattttgagataaagttcctaataaaagaaaaatactatgttgcgccggtgtttacgaccacttataccgcaattgcttactctaatccgcccgtgcctgcaagcggataatgtcctcgataagagcaagcgaacgcagtgcccgctgcctctgcccggctgtaaaaggagtaccgcgcaagccttctagtattttaagctccgccaccagttccgtagcgccaatcagcgtaaagagaggaatcatcttgtgcgaaacggccgccacctcgtccatatccgccgcatccgccgccttttgcaaacgttcggcattgaggcgggtttcggtaacgaaactctccataatggactttgccgcctccgggtcgtcaccggagaaagcggtgagtgccgagaagtcataaggagcatccggcgatgaagcctcaaccgtctccgctgctgctacttcgctccgcacagcagatgtttgtccgataccttccgcattcagttcccagaacagttccgccaccgtaaacggtttgtgcaggcagccggcaaagccatattccttgaactcttccggcttcatatcgctacgggcggtaacggctatcacgggaatggtctgcgcttggggcaggttcgacgcacgcaacagtttcaacaggtcgaaaccgttgatggcaggcatctgtacatcggtgagcaacacatcaaaggtgtcggaacgcagggcatccagcaattcgtccaattgcatgcacgataccgaagcgatgccgctatgctggagcatggctgcggtaagcgtaagctgaatgcggtcgtcgtcaatcagcagcacacggagcgaaggttgtgaagaagcgggcatgctctctgaaagagcggaagaagttccggtttccgtctcctgatatttctcgccggtatcctccgatacctgtacggggaacaagggaacacgcagcgtaaatgtacttcccttgcccggcacactgtccacatcaatcgttccttccagcaactgcacaagcatgcgcacaatagacaaaccgagtccgaagccctctttgccctgcgcaccgggaaggcgggtaaactcctggaaaatccgctccctgtccgccggttccatacctttgcccgtatcggcaatggccaccaccagccggcgttcctcgtaacgcgccgtcatcgttatgctcccctcgtccgtaaacttcactgcattggacagcaggttgttgataatctggcggagacggagcgggtcgcagatgtaagtactctccagttcgggagcaatatcgcaatgcaactccaggcctttggcagaagtcagcggttcaaaactgacatgaatctcttccagcaagcgggcgggatggaaggtgacccggtttatctccgccttatgaaggtcgagcctgtggaaatcgagcaaatcgaccaccagcttcagcagatgttccgatgaggttttcatattatccaggtagaagcgttgccgttcgtccaccgtcagacgggagagcagatcggcatagcccatgatggaaccgagcggcgccttaaagtcgtgggtgatggcaagcatcatcttctcgcgcgtggccagcaggtcctcggcacggcggcgggcttcttccagttcgcggcgatagcggttgctgcgcgtaatgtcgcgccctatgattatcaggaaaaagacggaaagcagcaccgcaccgacggcaatgccgctgattgtcttaatggagtgatggcgtacggactgctggtactccgcctctttgcgggcacgctgcagggtttcctgttcgtagcctttcagcagactgtcgatacgggcggtcagcattcggtccatgcgttgcaaggtacgcctgcggcgctgtacaatcgcaatgtgttctttctgctgttgtgccacggcacgcagcttttcctgcagggaatccaccggattatacacgttaatcaccgtatccgtggcatattcgagggaagtctttacctgaatggcggtatctttcttaggcggcacgaacacctctcccaaacggcggaagaatcctttcttcctgggcttggtaaccaccgtgtcgcgatgcgtaatgatgcgctgctgtacgcgctggtttgtcacaaacgaatcctgccgggtagcgataatattttctatctcccgggtagagaccatgctgtcgttcgtctcgctcaacacgcgcagcatgtaaatggtgttcgcatccttcttccgaagaagcgtgatgagactgtccgtccactgcacgtcccggttatcggaaagcataagatgctccatctcccggtgcacaaagaacagggaaaagaacaacactcccagcagcagagtgtatccgacagctatctttactttcgatacgctattcataaacaggtaataaaagagttatggagcgacagggtgacaaagcatcgccccgtgcatcatcttgtcctcgttttatagcggaagcgcagccacagcatcaccccggcactggtcagaccgaacgggaaagccatccacacgccgaccagtccccagcccagtacaaaaccgcaaaaatatcctacgggcaaagatataataaaataagaaataaatgcaataaccatcatcggctttacatccgatatgccccgcagcgcattggcaaagttgatttgcagtccgtcgccaaactgataaatcaagaaagggaagaacaaagaggctaccagcgccgaagcctctgcgctatccgtaaaccagccgcccacctgtccgcgcatcacaaaaacgatgctcataagcactacttccatagccattatcaagtggaaacccgcaaatgtggagcggcgtacattctccatatcgtcttgccccttgaaattgctgacacgcaccgccaccgctgcacccataccgtagtacatcataaacgtaaattgcgagatggtcagcattatctgatgggatgccaaagcgatagtgcccagccagcccaccatgatggcgctaaggctgaaagaggccgtctccattcccatctgcaaaccgacaggccagcccagtgcattgagtttcttgaacaccggaaacgaccatcccatgcgggagaacccgatccggtaacggataaagcggcggccgcgcagcacaatcaacgcaaacaccaacaccatcataatacgcgagaacaacgtactgatgcctgctcccagcaaccccagttccgggaagcccagtttgccgttgataaggatatagttgcctatgatgttcagcgtatttccacccagcaagatccacatggcggtcttcgtatctgtaattccgtccgtaaactgcttgaagccgttgaacagcatcacgaaaaccagcgaagcaagcaataccaggtaataaggttttatcaaaggcatcagttcctcgggctgccccaggcgctccacgttgaagtagaccaccgtcatgataaacgtaaggagcaacgccaccaggacattcgccaccaaactgcaacgcaacgcctgccctgcttccgcaaaacggcggttgccgtaaagactgcccacgataggcgtcagcccgtaactgaaaccggtactgaaaatgatgcaaagcgtaaatacattgtttacgaaagaagctgcacccaactcctcggtactgtgatgcccgatcatcagagtatcggcaaaaccgagaataattactcccacctgtccgataacaatgggaagtcccaaaaatatcaacgctttataatgctgcttatagccggctatccaattcatcatcttattgtctaaaatttgtttcaaagggagaaaccattgttcccctggcgggaaaccagagtttccttagtaagaaaccaaagtttccctaatgggaaacgggagtttcctcaatgggaaactgaagcttcctcaacaaggaaaccgaagtttccttaacagggaactttcgtttcgtcaaacggcgcccttcccttcctgcaaagagacgaaaaacgctccctttgactgtcatttatcactcttataatataatactacggcattgctttcgcagaaagtacgctgcgccacagtatgcaactgctccgtcgtaacggagcgataacgctctacttcaaggtcaatatcttccgcctttcccgtcagctcgaaccaggcaaggtttgtggctacgttcagatagttgatattgccgaatatctgggtagattcaaacttgttcttaaccttctccagttcctgcccgtctaccggagaccgctgcaactcttccagttctttacggacggcagcttccgcctgctccaacgacacacctgccgcaggcttaccgctgatttgcagcagacccgcatcacgcgtaccgctgatatacgcgtcgataccggaaaagatattctgttcctgtaccaagcggcggttcaaacggctggaacgtccgttgctgagaatatcggacagaatatcgaatgcgtaataatccgcaccctcgcgactgcacatgtgatagcccatgaacaaggcgtccagcggcacgtttctttctaccgtcagccggcgttcctgcgtttgctccggctcctgcggcaattgcctcaccggaacgttccgccggggtatgggagcaaaccacttctcggtaagcttaacggtttcatcccatgaaatgtttcccgtcactgccagcacggcattgttcggagcgtagaaacggtagaagaaactcttcacctcgtccagcgtggcttgctctatgtgcgagagttccttgccgatagtaggccagcggtacggatgcacccggaacgccagcggccggaacagatgccccacatcgccatacggctggttaaggcagcgttgcttgaactcttccatcactacaccgcgttgcacttcgaggctttgctcgctgaaagccagctccagcatacggtcggactccagccaaaaggccgtctctacgttcggcttcggaacggtgaggtagtaattggtaatgtcattattggtccaggcattgttttctccccccgccaactgcaaaggcgtatcgtaatcgggaatatgcgccgaaccgccgaacatcagatgctcgaacaaatgggcaaagccggtatgctcgggatgctcgtcgcgcgcaccgacatcgtaaacgatgttcagtgccaccatctgcgtgctggtatcctcgtagtgtaccagccgcaggccgttggggaaacaatgcttatttatcttcatacttgtgtgacagagcgagactctcttcccaaaggtttgacgcaattctgtttatcagtcaatcacagtcaccttctcaatcttcacatcctcttccggacggtcgctgcggtctgtctttacctgttgtatcttatctaccacatccatgccttcaacgacttcgccgaacacggtatattcgccgtccagatgcggtgtgccgcctacagtggtatatgcctttacctgttccggcgtgaagcggaactccggttcgccggccacctgagcctcagcctgcgcgataagcgtgtcctgcagattcatcagcccttcctggtcaccgtccttacgcatcttgtagatttccttcatgtgcttctgcgccaaagcattgaaagcattgttcaggcgtgcctggttcatctgatgttccatgccgagaagcgtagaatcgttatacacctttccggtcacgatatagaactgacaaccggacgattccttcttcgggtttacgttatctccctgacgggcggcagacagcgcacctttcttatggaagtatttcgggtagacaaactccgcaggaacagtgtatcccacatcgcccgctcccagcatcttgcctttcggggcattcttcgattcggggtcgcccgcctgtatcatgaagtccttgatgacacggtgaaacagcgtaccttcataagtaccttcctcggccagcttgataaagttatcgcgatgcttcggcgtttcgttatacagtttcacgatgatgtcacccgcacttgtctcaatcttcaacttcgtttctttttccatatttccgtctttcttttgtcccggtttgcaggccgtcaggccgcataccagtatggttaataatacaatgagatttcttttcatctgtctttttgtttaatttaagcctgcaaatatactaaaatcggacaaaacgatttacctttgtgccataaaagagataaaaagcagaagggatgaaatccatattaatcgtagaagatgatatcacttacggcatgatattgaaaacatggcttggcaaaaaaggattccaagtcagttcggcaagcagtatagcccgtgcccagaagcatatcgaagccgagacggtggacctgatactgtccgacttgcgcctgcccgaccgcgacggcatagatttgctgaagtggctgggagaacattccctgcacatccctcttatcatcatgacgggctatgccgacatacagtctgccgtgcaagccatgaaactgggcgcatgcgactacattgcaaaacccgtaaaccccgacgagttattgaagaaaatggatgaagccctgaagtcctcatccgttgcttcggaacagaccatccgttcgacccaaacagaccatgcgttcgacccaaacagaccgtctgtttcgtccaaacagaccatgcgttccgaaagcaatgggaatccctgccggaaaggtgcagagaacgcttcatccgactacctggaaggcgaaagcgatgccgccaggcaactttataattatgtgaacctggtttctcccaccaacatgtccgtcctcatcaacggggccagcggaacaggcaaggagtacgtggcgcaacgcatccataagttgagccgccgcgccaaacagccgttcatagccattgactgcggagctatccccaaagagctggcggcttccgaattcttcggccatgtaaaaggttcctttaccggtgcgctgaccgacaagacgggcgcgttcgttgctgccaacggcggcactatctttttggatgaaataggcaatctcagctacgaggtgcagatacaattgctccgcgccctgcaggaacgtaaaatacgtcctgtcggctccaacaaggagatacaggtagatgtgcgcttagtgtccgccaccaatgagaatctggaacaggccatcgagaaagggactttccgcgaggatctctaccaccgcatcaatgagtttaccctgcgtatgccgcaactgaaagaccgccgcgaggatatcctgctctttgcaaacttcttcctggaccaggcaaaccgtgaactggacaagcacctcatcggctttgacgaaaaggcatccaaagctttattggaatatcaatggccgggcaacctgcgccagatgaagaacatcgtccggcgtgccacccttttggcgcaagacaaactcatcaccctgaacgagcttagcgaactgaagagtccggtagccccatccgcagcaggtatgcctctccgtaacgaagagaccgagaagcagcagataatcgaagccctgaagcagacaggatataacaaaagccgcgccgcccaactgctggggatagacagaaagacactttacaacaaacttaaattatatggaatagagttataactgtggaaaaactccacactctattccacactttccacaccgcttccacacatcttcacacccctgcgcaccttcacagtaaaaatagcgtgctaatctgcaatgacttaccgtttccaccctcactctggcacgtcatttgatatatatattgtgtgaagtttaactccacaacatcaaagtagaatctacctaaaccaaaaccgaataaatatattaacctaattaaaaacaagtaaaaaacaaaaaactagtattagtagcagccctgtttatgtttgtttgtgacggatcgttcttggcctgagcacagatgcaaacggccaagagcatccatttcacaacttcatgtgccgaataacagtaagcacactgacaacaaaaaagccgtttcctccttgtctattccgggaaacggctttttgtcgtaataaagcagtgaggaactttttcctcttatcttaatatcttaccaatgtctttccgggtaaaggtcgttccaccatgccggactatcttgcagccaacgtgcaaaccatgccataatagagttgtgccacaactcgcgcttgggataatcactgatgaaatgattctcaccgtccaccgttatgaactcaaccggcttacccaatatcttcaaggcattgtacaactgaatactttcgccgataggcacattcgtgtccaccgtaccatgcaacagcaacaacggggtcttgattttatccgcattgaacaatgctccgtgtttggtaaacaaatcggaattattccacggatagctcccggcagcggcaacggagttgtaggaatagccccaatagccctcgccccagtaactggtcacgttactgatgcccgcatgcgaaacggcagcggcaaacaaatccgtcttggtctgcaagtacatcgtcataaaaccgccataggatgctccgatacagccgatacgcttgtcgttgacaaacggatgcgcggcgcagaacttcttcgtgccctcgatgatttcatcggcagtgcgttctccccacgcattgacatgacgggcggaaaactcctgaccgtaaccgatagccccgctgggctggataacataaaccacataatcgcgtgatgcaaacaattgcgcacaataaggcgaagtgatgccgcgtgtggtaggtgtagtcccgccgtagtaataaacgataagcggatatttcctgttcgggtcgaaagccggcggcaggcatatcatacccttaatctccgtaccgtcttccgccgtgaagttccactccttcattgtgcccatatctatcttgtccaaaacggacttcatcggattggcaagcaaaacggatgttttcttcttcacatcatacgtataggcaactcccacactggcattgccaccaccgacataggcggcaaccgcaggattgtactccgccaggtcgaaggaagaaatcacatcttcctgaagcggcagcatttcaaaactctccgtcttcggcacatagcgatagatatgtctgcaatcttcgtccgttgtattgaagtagatacagccgtctacacggttccactgcaggaagtcgacggcaggattgaaatcgcgcgtgatgggattaacctttttcgtggccttgtccacaatgaatgcctgagtatcgaaatcattggcgatgggatgctcgccgcagtttttccctattccgtcaaaagccatcggactgccgattaccaaaagctgtccgccatcgggagagtaagccgccctgtttacataagggttccacgccaccagcgtatccgcctgcaacgtagccaaatccagctcgaagatggaagtaagcgagaaaggacattgagtgatattcgatttagaggtggaacacaagagtttcttgccgtcagaggatatatcattcagataaacggcatggctgccgtaagtgagacgttcggaaagtccggtgacagggtcgtacctaacgagatagttgcgggaacgcgcatcgggaatccggtcgtcgggatgcagcagccgcttcaaaggaccgcctaccgcttctcccttatcatccggagagtagataagatagtcttctgcaggcgaccatgcaaaatatccctcgggaacatctttcagcaacacttcctcgcgcatggtagcagggtcgaacacaaccaaatcattccgttgcctgcctgttacggtataataaagcttattgctgcggggcatccaacgcattttctcatcggcagcgggcagtatcaccctgcctgtcttcagttcggtcagttcacaacgtgtccttgagcgcttcaacgagtagttatccgcatagcaggcaagcagatatttgccgttcggagagaggctgaccgagcgcacgcgacttccgaaagccgtattgtgcaatgcgaaacgtcttttcaaatcgggtgcgagccggtaacctacatcggcaaactccttatctttctcaaactcgcacttcaatacgggaacagccttatcggcagccgtcgacaacaatttaacgactatctcataatccgtttccggctccagacgcagactgagtaccgaaggagcaacctgcgacaagctatcttccgcagttgttttagactgtttggaaacaccattcacaaacacctcgaaacgcgcgggagagtaaatattcaactttcctttcataaagcgttccgcacgcagatgggtggcaaacagatagaacagattatccttatcggctttctccacccgtacatatcctgcggtatccgccgtgatacgttcgtaaggacgcccgtcgaagtcaagactgatatcggttttcaacaaagcgtcggccgtgaacttctccccagtaaaattgatactgtcaccctggaacggagtacgcaccgcaacggcaggacgtacattgtattcggtcactttatcctgtgcccgaactgcaagcgcaacaagcagggacagtcccgaaagaatcagaatctttttcattgaatttgttattaacagattatcaaaccatttcaaagccattccatagattaccggcaggtacaggggcttccacctctatcagcttcttggataccggatgtacaaagcgcacaaagcgcgcatgcaggcaaatgcttccgtcgggattggaacggagagaaccgtacttcaaatctcccttaatgggacatcccatttttgccaactgacagcgtatctgatgatgccgccccgttttcaggtctatttccagcagataatagttctgcgaccgggctatgagccgataatgcaaaatcgctttcttgctgttcggcacttccttatcataggcatagctcttgttttgcttctcattacgtaccaaatagttcaccaactcaccctctgactcccgagggcggttcttcaccactgcccaataggttttcttcacctcactgttcctgaacatctcgttcagacgggcaagtgccttactcgttttggcaaaaacaacaagaccgcttacggggcggtccaaacggtgtgtaacacctataaagacattgccgggcttttggtatttctccttaagatacagctttacggtttccgaaagcggcgtatcacccgtcttgtctccctgaactatctcggaagcggtcttgttgactataatgatatgattgtcttcgtatacgacagtcatttatttagcgattagtgattagcgattagtgattaaaaaactgaggttagcggctggcaattctcactaaccgctaaccgtcaatcactattttacatgttcataccaccgtctacctgaattacctgtcctgatacataagaagacatatcagaagccaggaaggtagcaatattggcaacgtcttcgggagtaccgccacgacgcaaaggtatcttcttgcaccattcggcttttacttcttcggacagcgcatccgtcatagccgtcataatgaagcccggagcaatagcgttggcacggatgccgcgagaacccagttcttgtgcgatagactttgccaatgcaatcataccggccttagaagcagagtagtttgcctggcctgcattaccgtgaacacctactacagaagccatattgataatgctgccggctttctggcgcatcataatcggagtacaagcgtgaatgaagttgaaagccgatttcaagttcacgttgataaccatatcccattgctgttcggtcatgcgcatcatcagaccgtcacgggtgataccggcgttgtttaccaaaatatcaatgcgaccgaagtctgcatggatagcctccaccactttggcagtatcttcaaagctggcagcattggaagcatacgctttggcctttacgcccaacgtttcgatttctttagctgtagcttcagcattttcgtcaatcaccaggtcggtgaatgctatattagctccttcttgagcgaactttaaagcaatagccttaccaatgccgcgagcggcgccggttacaatggctgtttttccgtctaataatcccatactgtttttaattattgattaaatgtttttatgttctatgcaatgcgccaaacacgaggttgacaacgtatttgtcgcgggtttcatcatccaactttgcaccgatatggccacggatatagggcacttcaatcccttttacgcaataatgcaccaactcggcagtcatgtcaatatcgtctattctgaacacgcctttctccactccttcgcgcaatacatctttgaacagcagtatctccttggcatcaaaacgcttacgtaccttctctacccgccaaatgtcgcgaaagaaattagcccggagcgtcccattacggaataccacctctttcactgcatccagacgcgtgtatatcatttcaatcatcttctcgtccggcgatatattcttctccgccacacgcctcatcatgtccgaaagcatatccagttccgattcgacaacagccatataaatatcttccttgctcttaaaataggtataaagcgttctcctaccttttttagaagcgagggcaatatcattcatcgtggtattctcaacacccattttagcaaacaactgacgggctacatccactaatttagcttttgtcttcgatacggccatagactaattgcacattgcttaataatttgtgcaaaagtaagacatttccgcatatatcacaaacaaaagcacattttattaacaataaagccaattagcaaataaaaatatttgtattttatcagcctatttatcaaccaattatgtatattagtgcatttcttatgaaaaataatccggcttttatttgcaaattcaaataaaagccgtacctttgcactcacaaaacatcgcggagtggagcagttggtagctcgttgggctcataacccaaaggtcgtctgttcgagtcaggcctccgcaactaaaatgaggataaaagattgaatttcaatcatttatcctcatttccttttaaaaggtcggacaaaattcggacaaaaaaaacggatcaacgtaacaatctgagggattttatatttaagcatataatttagcaagtctatataagaaaaaagctctatctcttactcctctgaactgtgctctaaatgctttgattttagcattgaatgactctgctgcggcattggttgccctcctttcaaagaaattgattatatccagataatgtgtttgtatagaacgtgcgacccttccaaaggtgaggaaccctgatttatctacttcatcataccaccttgccagccttgtcaaagcaatatccttaaacttacactgatgatagattaagcctaaccgcatagacagataatatcctttctttatatcgggatattccttgaaaagaatttcagcccgtattctttgagactgagtccataaggattccttcttgtaaagcagataaatacttctcgctaacaactgctttcttgtatctccattagcgaaaacaggtgcatgatacatctttccacaggcctttgcataagcaatctgagtggactcttcatccaaagcctcccagcgagcttttacacgcatctcctgcacagattcataagctaacttctgtacgtgaaagcgatcggtaacacgtttggccgcaggaaagcagatgcgtgcaatctgctccatgttaggagccatatccaaggttatctcgcgcacttggtaacggcggcgacgggagagcttaagcaggacagaagtgaccgtatgaacgtccgtacctttaatgatggcaatcatactacctttaccaccgtgagcttctttattggtcagtacagtatagagttccccacgcgagagggctacctcatcaatacagatataagcaccgatattcttttcgaatagtagccaatcctctgcatgaacaagttggtcccaatggagataaccacttagatggttacggtattgacgctccaataaatccccgtcaactccatataaaacacctaagagcttgcaactgatcggatagttatcaatacagttcttttaaaaaagacgcaaaatcctgcgtcatacgagtaccttcagccaccatacgccagttacgggagatatactcattatgcttctttaagagccagcgacgacgacgaatattaaggaagaccttcttgccacgaagaggaaaatcctgaacaataacaggagcataaaagcctttactctcagtatcctgatctgtatacttctcaggaacgatatttttctcctcaaggtagatcacaacttcatttacgctttccttcacatcaacaagatcaaagtaatctaaagtgccttcaggaagaagaaggcgataaccgtttaattccataagctatgaatttggagacaaagataacaatttataaatttacccctcaggtttttacattgacccaaaaaaacagcaataatattaatcatacgttttcgcattcgaaaaacgtataaaaaaatgtcttcacccaaaactcgcaaaggctcatctataaataatatagtagattatactctcccaaagttacatacggggaaaaactggtatattgattttacctgcttcgacccagcagacggaaaaatgcggcgaaaaaaatacatgttagactctattgaaaaaatttcagaccgcaaaaaaagagctgcagaaatcatcgctaatacaacaacccgtcttcggaatggatggaacccatgggcagaagcatcaacggaacgccaatattccaaattctcagaggtgacctcattatatataaggtatattgagaaactcacaagcaacaataccctaaaaaagaaaacagcctatgattatcaatcgagaatgaatatgttgcttgagtacaatacaaccaaagccattcctattatatatatataccaatttgaccaatcatacattagtgacttcttagattacatattgttggatagggactcaacggccagaaccaggaataactaccgcacttggctatccgcgttttgcacctggctacaagagaaaaagtatatagacaacaatccaaccgaacgaatcaagcccttagtagagggggaaaaacatcgttccgcattgacaccatctgatttaataagattaaaagaatacctaacagaaacgaacaagagctttctactggcctgcatgatggaatattacacatttatccgtccggacgaattaagcaacatacgtttgagtgacataaatatcaaagaacagaaagtatttatatcttccaccatcagtaaaaacagacgcgatggtatggtaggtctgaatgatacagtaattaaaatgatgatagaactggagatattcgataatccaacacactattatctattcggaaaacagttcaagcccaatgcctgtaaagcagactcacgcatcttcagagaatatttcaacaaggtaagggcatttttaaaatggccgagcaactatcagttttacagcttgaaggataccggtatccgagatttggcaaatgctgaaggaatagtagtagcccgtgatcaggctcgacatgccgatatatccacaaccaacaaataccttcagggttcttccttaaccgtacatgaagaaacaaagcatttcattggtggattgtaatgtaaaaagccccaactttccagtcggggcaacacttatctgaaacgataagcacaacatctacgtcacaaagatagacttttttttctcaccttatatataagataaaccaaaagcaatacaaccaataggattgcatacacatcaaccttatgcagttgccaccaagaaacttcctccaccttttcttttttcaaagtggcagcattaaactgctgcctcaattcgtcaatttcagtaatgagatgtttcaaagttgcctctgttctcatatcagtagtcttatgctctttctcctccttgttaacagtagtctgactaacacttgtcggatattgcctgcctatactgtcaggaaccgaaagatagacggttttattctccaacttcaaattggataacttctcgttcgtctccttctgcatcaactgcatattgtacagcaatgaatccatgcggttctgcatctgatgtaaaccattgaaatagtctatctgtacattcctgtcaacattttcaggagtggcacatccggataagattgccagcaatacaactaatagccacggcaatgctttcatggctcaaaccttaaatcattaatccggttcatccacccccgtttaaatttgttgtttgccggccgcttgcaacaaatatcctcaatgaagtcaaaccgggctatcttaatcatgtcgaacagttcacgcgggttcctggcatttactgcagcaatggtcttaggacctacaataccatctacagaaacaccaagcaaccgctgcggtatctttatcccatgcgcaccagacgcccatacccaatcaacaagaatattcgccacagactgattctttattaaatcagctttccatctgtcccaataatgcggcttaagtacccggctaacaacatcttcacgggtaagcaggtgcaaatcgtccacatctatatcaccgtcaccgtctttgtcgtaaccacacgacttccatgttccgatagttaccccaatattagtcgctccgccaaggtctacggggtcatccacgaaaccgccctcccacttcaggataaacggtgcaaattcattcacatttgccattcttattttcctcctttacttttggtcttaataaaaatcattctacatttgcagaagcctttgtttaaactttaagtttatgctaaaaagggaagggagctgttgcgaaacaccttccttcccgtgaattaataatcgctcggtggcttccgcccgctacatccccggacatcgcaccgctttgcttccagctttatcttctctatctccagtgtagtgttcttttcaatcaactcgcggatacgctggcggtcttcattcttctcggcataaagctggtctatcttggaatcaagttccactaccctgtgttcctttttctcgtacagttccttccattcagcagcatacaaggtgatattgtcagcttccgcctttctcgcttccgcagccgccttgcgcttctttgaatcatagaacatgaacacaccgaaaagaggaagcaggatagtagtaactatcccgccggtgatgttgaacagttcattcagttcctccatcataccttcatccccgttacatgtttatcactccaccccttggcattccaaccgagaagaatgccggcaataaacgcaccggtactcacaatgcttgcccaaaacggtacatactggtaataagccagcagacctacaatcacggccaccacaacagccaaaacaatcagtttctttttcatctacgaacttttttaattaaacaaaaaacgcccacgaacgcatcctgttaaagacacgttcatgggcgttaaccaataaaacatgacaaatatactcatttacaatcacttttcagcgaaagtaaacaagaaatttatgagtagggaatatcttaccaggaaagggctgccaaactatggcagtagaatatcagtagaacctataaaatctacccacattctaccacacggctaaaatcagatgtttttttcttcctttttacagccttcaaatcacgtattattgtattagaaagaacctctgaatacacctccgtagttctgactgaagcatgaccaagcagcttttggacggtggtaatcggaacgccctgatgcacaagcagggtcgcacaagtatgacgggccgtgtgataggttatgtgcttccttatcctggcaaaggcagctaattgggcaagatacttattggcctctgaattgggtccgattttagcaaaatctgttactatatcgtaacgttccaatacagtcaatgccttaccctcaaacagaagatgtagcggaagccgaagttctactcctgtcttaatggacgtgaagtgtaaccaacgcttaccgtttaccttgataaagttggccggagatagctggcaaaagtctgagaagcgcagtccggtatagcaacagaacaggaaggcatcgagtacatggcggagcttcttgtccacatcaagattctccaacctcttcaactcatccggagtcaggaattctttccgccctttctcttgctttatcttgtacttccggaaggggtaggcatcggaagggatatacccctgattaatggcttcattcactaatgtacgtaactgcctcatgtgtttggcaaccgtattgacactatttcctttctctttcaaatgcacttcaaaatcctttagaaaggtataagtaatgtctttgaaatccaatccgggacgaaattcctgaagcacggttaccgttgtcatcaggttctctttcgtacttcttttacggtcggattcctgcacatagattctggcaaatacggggaaagtgacattgaccggcttgtctttctttatcgcatctttaagtagtgatagcgttacaggaatgccgcgcttccataaggataactctatcgcttgcaggtgtaggacaaactcaaacagcatcgaattgaggtcatgagcctgtgggtgattatcaacctgagcattgcgactattccaatgttccggcttgagatacaaatttgtacggaaataaactttcctctgattgagcaaggcttctacttgcactaaggccgttccctgtttgtttagctgtttctttcgattatacactaagcggtattttattttatccatttttaagccaaatgtacttttttggacgagaagctgcaaaccgatgtgggagaactgttatggaaaaaattacgtgttacaaactcttttgcaatccattatacccatcaagtccaatggaacggagtaagtctcaatatcattggcagccataatttctacaacgtaggggttcgattggcaacctacgcaaacaaagtaccttccgatggaatagtcggagagttttattccataccatccgggtttaccgatataaaagtggtttataaggactgggatgtttacgtagtattcactgtagtacaagggcaatctgtttactttaaatacgattgcagtacccaatgcgatataattaaagatattggtttcatagacgaatcatacaaggagataaaacctattgcacaatagtgcaatctgccagtccggtaatttcatcatcttgtgtagccatatcatacattgaatctctaactatcagttctctgacaatagttctatcgcctaatgacttgtccgaagtcaagtatatggatattctatggtcagtttcgtatttcattttcaggtatgtatcgctattgggttgtccatataggtatttgacatatacttttgtagaatcttgtaattccatagtattaccagcaatgtaaacgtaaaaatcacttaatggttcacctgtggatatacatgatactctgatagcaaaaggagcccattgggaagatgatgaacggtatagtaatacgctacgtttgccttctgattttatctttgttgttgcaaacttggaattacttaatccgtctttctcaggagttacaactggtatcagttctcccacatccgtaaatcgacgtgggagaactgctcgatggtggagctatcaaacagaagcggtctgacctcaaagatgccgaccaatatacaacaccaggaacatacttcgtaaacctatggggcggagtgtagcaaaatatgccgactaacgactgttttggtctatttgaagtacgttcctatgacggttatataacgcagcggctttcggccggcaacggaaaggtgtttgtccgtataaaagaaggtgaaaaaccattcaagccgtggccaactgccgcacaatagcccccgttatagcttctccgttatctccgtgaagctatcgtcgatgatgtccggtgttccgaccaattggacaccgtgaggcgataaaatatacgcatgattaggtaactcgttattgaatgtaaatgatacgaataggtcacgtccttttatgtagtattttacttgaagcggcttttttaaaattctttttaaggaagccgccaaacctgtatctggtatgtatataaatgataaaaagtccatgcacgtatcagcagaatcattgcataagaccgctatcggggcacgataccagtcagtcacattgtctgcaatcttatatacagaatcgtaagcatttacaaaatgaggatataccttgaataaatccggagataacaaccccgctttttcaatagtggttgtaccaatcagttctcccacgtcgatttacggatgtgggagaactgttcacttctttaggatttttcccgtttatgcagcgtgatataattcaaggagaaatgtcccccgatgacatacgtacaagtggaatgtatgacgtggggaattctaccactatgccattcaattacggtggattacttgtatttaatactaagactttaaccattcaaacaggtgttgatttacagggaaaaacaatttgtatacgggtaagttggaataatgggccttggtcctcatggaacaattttacattcaatcagcaaagcatttaatcaattattttggccgggaatataactccccggccattataccctaatcatacttcgacggcatctattgcatcttgtggaaattctttaattacttcattcttaaattccagtctcgaaaagtctgatgtagataggattgaaatcaccgggtcattgctttcaatatagatattcaagcggttatcttctgttttcttatactttaatttaaggagaatcaactgatgacttttaggaattaagtggtgatagcgaaccgaaatatatgtatcatctacgccatacataacctgtacaacagcaagtgtattctgggctacataagtgtgccgggttgagactaagaagttgacaacacactcttgacttacagtcattaataagcattttgcattcatccaaaccggaaccattttcttatcccaaagtccatttttttgaaaggtagccacaggtatcagttctcccacaacttgcgccaagtcctctttattgattaaaatcgggttgcggtccttatccaaagcacgtacataatttatctcttttttctggggaagtgcgctttcgacttccttcatcgttttaattgctcccataattattgaatttaaattgaacattattttaatcttttctgaacaccacatcctgaatcttccagttccaggtcttgtcatccttctttccgctattatggaaattcagggctgacttgatgatattctccttcaaatcatttttcttgaactcgacttccgccttctgcggaaattcctttacctgcgcggtatctactgagataatcagcgcaaccaataatgtgtctaacataatcctttttattaatattaataatcgaataccaatctccttaatacgctgccgaccgctatgccggcagcatccgcaagtatgtccagccagtcccagcccgaaccgaccttgcagttcttcttatacatccagtcagcggcttctttcgtcacgcctgccgtaacggcacagagttcacccaccgtcagggtgatgacaaggcatgcaagaaaatgcagcagcttgtcgttaattcttaaaaacatatccaacataaccattatccacagtaaaaataaatccaatgactaccgtcaaaaacgaaaaagcaggatatttgattgattgaagtagcagtggttgtgcctctgttattgggattcatcaggggtcctttcactgagacattccggttcaactggttcttcaaatatacaatccggcctggagtagttgaccttggaagaaacaaggtagggtcaaaacttagatccggtcctccatatatgataatatcatcggtatcactgaccgtatagctcggtggggcagacatcatactactgcctaaattgcggacacccgcagcaaatccggaagcccgtaatctgcttattcttaccgattcaccgcttctggcattcaaatctacattaccatgtgcttctatcgcgcaagtatcatatccggcctgggccatcactcttacaccggttgaatggtcaccgtaggcatccaaactaagtgccgtaatcccatctccacgaatacggcacattgccccggacgagacattcacttcaaaaaacttcccgccatccttgcctatcctcaatgtcgcggtcggattttccttttcgttttcaagtcctctgttggttatcttgaatgcaccgatataaccttcggttgcggtaacactgcctgtaaactccccgtctgcaccatcaagatgcttcacccgcagattatccacgtcgatgaggtctgcatctatcttcctggcaagcaaaagctgcgtacccagtagcgggtattcctggatggatttccaggaagtagtgtccgggttctgggccacatcgtcgaacgggtgcatctcgctgtttcccggtacaggattcatccacatgaatacaaaccccttatccttatccaggaaatattccccgttcttgtatttgaatggcagcggtttccagccaccctcaacagggaagggggacgggttctgccgcacaatgctggccctcttctgagcaagaagggtctcgcgggcactatcacggtatgcttccacaatcacggaatccgcattgccccatttatcagacggaaggtagtattcccattcgggcgatgcaccgggggaatccgccgtaccgaggtccttgcctgccgactggatatgcagccgccagaatacatccagcagggccgcatcagccccgctgcggtgcagggctttcagcttcagcggcaccatctgtacattgttacagtctacagagatggcagccggctggcactcgatgtcaacgtattccaccgggtcaggctcacgtaccgccacgacactcaaaaccgccgttaccatcatagctcaataggattagtgttcgttgcgattactctgaatgtcttggcgcgtgccgcatccgtataggtcagtgcgatgtccttgccctggaacttgttgctatccttgcccgacagcgtgaacggattgttttcaccgtcgaatgtggcgaagtcccagcttgccaccgccacttcctctccggactggcgtttataggcatacggaataagagttcccgtctctcccggatatatctgcccgtcagaagcaagccccttgaccttgaatgccgccagtatagggtctgagaggtcgaacacggtaatgaagccctttgcaatgactttcgcattctgcacagcctcacaacttaccaccagcgaaccgtcaatatcattcgcggcaatgttctgggttccctgtgtaccaaggttggcctctcccgacggcagctgcttcttccattgcaacgtaatgttccccaaatcgttgataaggtctccgccactgtacagcgatgccttcaacgtcagcacttcggacggattgattatctgcgtacccttgtctgaagtgatgaataactcatactgtttaccggagctttcctggataacaacatccgtcgcaagctcgttgaatgcgaccgtatgcccgccaatttcaacttccccggaaacagttatgcggtcattgtcatatccggagatgggtacgaggttcttcatcacccgaagtcccgtcatgggataggactgcgagtctacacttacattgtacccggttacgcgtttgaaagtaccggcaaactgttccgtagtacacagcccatcctccccaaatgcaagttcggttccgttatacttgaatacaagtttggaaggaatgaggatacgcccgctgctcacgtcacgtaacacgacaatgacaatagggcgtttgtcctccgccaacgcttcaaagtccggcgtatacttgtcacttccctttgtccatgcctggataagcggaccattgtccacgcgtacatacccgttgacggtcgttccgttgctcaccgccacgatagccagtgaagcggtcacttgattctggttcatcgtctgcctcctttcctttttccgtcagtctttgccccggccggctgttccgaaccggtcacgctaccatcaccctcttccgacgccccgctgtcgctgtccggattcggctcttggctgaaaccggggtctatttcctcttcctcttcgggtgtcacactaaaaccggggtcgatgtcctctgaaccctgcatcgcttcctgctgtttctctatcagttctttcaactcacgtgcagaaccaatgatgtcgatgtcaagaagagtacccacattccgcatctcactgataggaatgtacaccctgccgtccggaagggtattcattatcccaaagaacttgccttcgagctttgccttttctacaattacgtacatattgattaaagtttaaagttgttactattcatataccggacccgtggcaatgaataccgtctgtccgtcaatctgtgaggagataacggcaccttcctcgtctcccatcagggactcacctgtgagaagccccacttccgcccacacctggaagatatgtcctgccgggaaacccttgtccgccggaatgaactccaacgtccgcccgccggttgccagcaccttctccggctcgcccggcttcgcactctggcctttccatgtgatgcggaaaaggtcatcgtactctgtaccgtactcgcggcggttgtcgaagatgcgtacctcataggcgctcggctgcttcatatcatcggaaagggtgaagcctttcgtctggataatttcgcaatttaaggaaacggccatctccgtctttacctcaattaccacttccagccgcccgtccgtaggggcctgcggtctgctgcccgcatactcacaggcacggcaacggaagcttgcaccggtgacatacttcgcctgatacatcagcttgcgggtgtacactccgttcacatcatggcagacaataccggggtcatccggtgtaaccgggcggtatgctccgttttcaagaatgtcccagaaatatgcggcatgttcatcatccaccggttcagtgcctgtatagagctgcggttctatctccctgtcccaatagccggaacggtcggccagacgcagagggtcggtcaccatcacggaatcacccttcaggcgcaacgaatacgccttgttgtcataaaggtgcgcataggacttcacgctccgttcacagcggacctcgcggttcgtacgagggtccgtgaatatcgcgatgccgaaatactccaccggcttctccggcggcgtgttcttccggatggtaagcgcgtatttgggcacaccaccgctgccgtctgaaatgctgtaatactcaccctcgacgatgcggttggccgacttgtcacggggcgcaccctcgaaccactccacccccgtgagttccatttcaccgaataccgtcttctcgtcgaacgccgataccttcggtacgatgaccagcggtgtcagggtccggtcggggctgtattcccgcaactgtttgtcataggtctgcacgggactgcccgacaatactattatctctccctggatggaaaggggactcacataaatacgcccctgctgtttgttactctttattcccatagttataatatgtcaaaaccaaatctctgttctatctgctgcatttccccttcaaccggaatgaatacccggcaaatgaaggcaacggacctgcttacaaagccgaagtctgaaccgaccccgtgctggttcccgttgtcgatatggatggcaagcctgttgccatccacgtactcaggcgtccagaggttgtccgccggaacattgccgctgtcacggaaccattccacttcggtggcaccgtccgccatcacatcatccgttatgtcaattgtaccataaaaaacgcgtccggacattaccgtatccacacctcctatgacgaatgcctccccgcctgaaagggagagctggagcgaatacctgctgtcgccctcaaggagtccccatgacggggagttccatttcggttcgtcggttgtcttatctgacagacagccccacttgcagccaaggtggtagaccgtatgctgttccagcagggtatattcgctgccggaaggcttcgacagttcgtgctgtacaaaccggtaaggagcgccgctctgggctgtttccagagaccagacaccccggtctaccttgttgggaatgacatcgccgttgtggtcgagttggtagaatttctcggcaatgaccgtctgtgccatgacgcctgtctcattctcagaaatcggcagcttttcaagtgccttcgtatggggaaatctgccgatactgattgagtagttgtagtcctccagtattggtttaaacacgttagccaaaaacatgatgcgcccctcacgcgaagaaatcatccacgactgcgcccgttcgttgaagccacctgcttcaggcagcgtactgttacccctgcgggttacgttgtagccggccaacggcggatagttcgtgcctccaggtacttcgctgtccggatagagcacgaccgttatgctattctccgcactgttggtggtaagaatacgcatccaactggtgtaatactcggaaccacctgtaagcagtgtgttaatgatggagaagcagacatcgttgtcctggaacttcatgaagtcgaagtccgtgcgtttctcgatgctcagacggtaggtgttttctcccaaatcctccacggattctatcttaccaatctcggtgaaggagtaatcagattccattccttgaatctggtttattatcaagtcaagcactgacagtgaaccgcggacttccaaccgttctacctgtgcccggccatcagggaatatccctgcacccttgccggcaatcatactgtctacgaactcgccgaaccaagcaccaccaagcagcttcaaaagatattctgttgcatccggccggtccttacgcaaaaagttcttcagttcttcgacaatcgcattaatccagtcctccagttccgcatctttatctgcaagttcaaagaaattagcggccactctggaaaaattccgctccaatttcaggcgaacatcccgcccggtatcattggcgccattccatggaactatattttcatatttattatccatacttatttcaattccagttcatgaccgttaaattcaagaagaagaggttgccaacatataccgtactccaatgtatccatatcaatgaagtttagcatataatcagcaaaacgattatgttctttccggctttgcttgcgaagttgggcatgttccaccctcacaacaccattactcttcctgcgctcatagctgtaactcatgaacgaaaaggaaaagcactcaccacgtttagtacatgccctcatttcatttatagcctcgtaaacattcatgctgcaaatgtatcaagttagtatccgtagaaaaaggacatcattaccggcgcacattgccctctaacatttccactctcttgataccatcccgcacttttcgtggatctaccaccaattccttatccaaaatagccttcagcagttcattattcttctgtaacagcacaactatttgcaaacgttgctcaggcgtcaattctgaaacaggaccggaaaatgactgcgaaagcactcctgcttcttcagcactatagccaccgctgtacttcccacttctggtacgaacctgttccaatatctgtgtagtattcaacatacggattgtaccattcttctgtgccatatcaaatacatccaggaactgacggacatgcggattagcaactccttcatgatttgtcacaaactcattcttgtgtacaggtatcacacctgccacatcatccggattcccgctacgggtataaccttccacgtattcatcggaataaccgcccgatttcaaacctttcgcttcatcacgctgctgctttgccaccgcaatctgcgcagcaccactggctaccgctgccgcagccgcagcagcccccaatgcaggaccgacgaaaggtattcctgccatggccttatatgcttccatggccgtaacggcagtagtggccgtaacctgtaataccgcagccgcaaattgcttgtctgcatatttctttttcacctgattgatagcttcttccttttcttcttccaatttggtagtatccttaccagctttcttggcagccttgatttgcttgtcatatttacggctaatcttactaatctccgcatcttggagagcactgataagctgccccgtagccgaagcaactttcgctattgtctcaaatgcctttttggcattttcccctcttccttgctctccatcctctgcaatacgagacttttcctcctgatattcttcataggatatcaagtccgcatcatacatcgcttttaaaagcctaatcttctccttaaaagaagaagcattatctatatcctgaaaaccgtccttacgctgctcatctttatcagcctgtttatcctcataatccatatcctgcaatttagcatcaatagcagaaacatcctccccatacgcagccaacatgtctctccggtcattcagatattgacgttccaattctttcagcttctccagataatccgcttcccgtttaatatcccccgatatataagcttgtttcaatgctgcccgttgcgcctggaactcttcatcaataacagccaaattatcaccctgcgcattttttccggcatccttagcggcttgcgtcaacctatcagcctcggcaatcatcttatcataaatctgcccttgaatatccgaagcatctttgccgtatgattccaacaatgccttgcgtttcaataaataggaaacttcaattttatacagttcctgctggtgcttttctttcgttattttctcatccagcagtttctgttttaacaggttccgctcttcctgcatagcctctttcagtttttccatacgggctttcaactcttttttcagggtttcttcatccgcttctctcccatgcccattccctgtactgcccggagtaataacaacttcctccaaaacatttgccttattcttggcagagggcttgtttatgaacggattcatttccgccttcaccgcagtgatacgcttagccgccttttcaacgacttcaacataatcctgaatctcaccctgtatctttgggatatcgcttctatccgaataatatttctcaaggttcttggtaatggctttcgctgtatttttagcagtgttaccggcagcaatactcttatccgtagctacgaccattttttgaaggaaatcatctacctgtgactgaggcaatgtaccaatgagggcattacggacatcgttcatctcatcaatcttatccgtcatactctcattctgaatttcgtcactcttctcctgaaggaccttcctcgccaaattgcggtccatctctgtattaatatcccgataggcctgctctatatccttcagggacgaatattcattaagcaaataaggaagatactgcccatatttggtatttatttcctctatcaactctttcctgcgctttgtaccttccccggctgctttagtcgcatcagtcaatttgcgtaattgactacgttccttttcgctttgcgccaaaaaagaattaacggctttttccgcatctgaagtgcgggtcgcaaatttgtaaatagctacccccgctcctaatgccagggaagccaatatacccaaaaggttggctttactggccgcattgaaagctttcatcgcaactgtcgccctcttaatgttaccactcaaagcatatttggcagcactcagcaaaagggttccgctccgggatgcccgtgttgtgataatattcttcttttcctgcaaccactccaatgtctttgcggccgtcaaacgtttcgtccacaattcttgcgctttaaccgctgcggtgtatgcagttattacagcaatcgacgacaatatgattcccttatactccgataggatagaaacaagcgcacctaaccctttcactgtcatgcttccggtcgtaatcatatacttcattacaggaagcagcttctcacctaattctacccgtacattcttaaatttctctttcgccttatccaatcctgcctgaacggtattattctgcacattatactcattggtaatactcgttccctcacggaaggcatcattcgcagttttctgctccttacgtaccttttcaacgtttccggccaaagcactaatcactccggcagcttccgcaccggaaagcttcatttccttcagtataggagccatcttatccatacccccgagtttacccaaactttccaggaaacgaagaagcgcttcattgacatctgtgtcaataagcgtggtaaactcttccacgtccattttagcaagcttggcatacttcgccggttcctgatagattttcagaatcaacccttgtaatgcggtacttgccatttcactacgtagcatgttctggtcaagcgcagaagcaaaccccaacacatcagtaatcgtcaatttggcctgcttagccacaccgcccatgcgagcagcgaactctatcagatagggttctgctgccgaagaattttgggcaacggtattcacagcactaccggtagccagcatattctcacgaagtgtccggtttgcatccccaaacatctgtgacaatttgccgatattctttactgcatcttcccccaggtcctctcctaaagcgacattaatctgattggcagcatccacaaaatccaatacaccctttttaccggtgatgcccaaccgcccggcatctcctgccaaagcgttaagcttttcccgtggtgtacgggtatccatgtgcttgaactcctcattcagttccgccacttcttcctttgtcatcccggtatacttgataacctggctctccgcctcctgcatctccgcatactcatcaacacatttacgggctgtcaacacgactccggtcaacgaagctacggcactggttccaatagcagcatacctgttaaacccgtccgccatttttgaaagggaaaaacgggtatcacgcgcctgcacctccagctctctcatacgctttttggtcaacaggtaatcctgacgcaaagccttccattcttcagttccgggaatagccctatccatttcccgtttgagttgtgaagcccctttacgcagttcggcgtaagacaacgatgtccgtactccttctttacgatattcagccaggcttttattcaattcatcctgcctttgcttgagtgccttatactcatcagagtttttcttgccctccgcagccagcttatccatttccgcccttacagccgctatctgttcttttgtttccgcaaactttgttttggcttccgaattatcaatccggattgccattctaaaatcatttatgcttatcgccatacctatactactttaccaagacaaaggtatcctggcgattagctttgaaaaaggacataaaaaaagaggcctcccacaatggaagacctctacctcatcgcaaagcaatggtgtcaaacaataacaatgaaatgaagcttatagtactgatacatccgccaattcgttagcaaagctgtgcaatgccttctctatacgctgtttttgctgaatacggggttttgaacgtccgtgcatatatgaccacagttgtttttgatgtatgcctgtaagtctctccaatcctgagagagataacaaaccgccataataaagcaaaaggctctgtatatcataatgccacaccagcgtatagtctccttttatttgctcaggccaacgttcttcgggcaagttcttttttatcaaggcaatggcaacctcaacatctttcttgcactcttccacagtcccccctgctgcataaataccttcgcagttttctgaataagccccgaagctgtcggaacttgcacaaatattcattattattttctccatgatacaacgatactatttgagattattatataaaagggggtggggattaaatccccatagcccttgcaatttttcttcttagcggttctggaaactcttttgctccatgataaggaaccggttccgaaagctttccgttcttcgtatagaagtagtggctgccttctgcgtggctgaacttccaaccagccgcaagaattttccgatgaaattctgaatacttcattttgtttatctcatttattgtttgacactgcaaagatagaaatatttctattaacagcaaagaaataacagaaatatttctatcaataataaaaaaatcccggctatcctcacagactaccgggtacttcttactcagacaaaaaactattcatccagccaacggccattgtccaaccagacaccaccgtcacgccatttgccatccgtcaatatccaccgtgacaacgcttccgtatcacttatggaaatcggatagaacacaccttcccaggctcctttccgtccggacgcatcaatcatatatgtacattctttgcaaacaaaccgtttattgtgtataacaaaaacactccgtatgtcataaatattcgggtcgtaacaatggaatgtgaacttcttctctctctttatatcataatcctctttatacagatgctctgaaatcaccttcagctccattgattcccccgccaggctcatcttcgcatcgtccatacctgaatacgaagtgtggaatatcagtcccttattgagtatgttgtccgtatatacggtcggatacgggtctgagtccggtctacgcaaatagccggtctgtttcttaatgcctgtataaaagcccaaataaactgtactctttgacgtatcatcctcataattattattcttgatataatcttcaataccctgagaagaggtgctttcctctacattctcatccgaagctgtcaagtcaccggcactatccaagaccggaacaatacgcaatacatttgcataggtaacacgcccatccagttgtaccgtagtctgtttaatcggtactgccccatgccgtaccggtatcatctccaacgtaacgaaatcccggctggcatcatagaccaaatccgcatattcattgaccggacatccccgatataaggtatgcggttttccgcctatatcctccttctcaaaggaagtcctgatgtattctatccctgtgctggtattcgttaccagctccataccatttgacttattagcaaagaaatcatgtaccgcagctatcccgaccacattttttctttccgccatctccatcaatgcgtccggcaatctcctttttttgtaatactcactatccggcaaatcatatttcacattcctgataccgatattcacttcttcctcctcgtcttccgtttcctcgacgtattcgtccttcacagaagacaaataggctaccggcggagctacgtaataatttgcggaaagcattatcctgacgctctttttccggctatctataataaagaggataccatacagtttttcaacttcttccaaaaactccttcacagtccagccgggaaacatcttggcgtattccgttgtctgttgggcatggataatcaactggtatttccaaggtgtatcggtaaactggttctctacaatctgatagccaagtgcctgtatcatcttctccatgacagtagccatatagggcatcggaatatatataccgtctgcaacctctttaaaagagagttccgtgtacacccctgccttttccccggatttttgttctgtaagataatattcgagttcgaacggattaatcatggtttctccggccaacacgggcggaagattatattccacttccggatacatcttatccagtaacctattcttacgtccggcagacggcatgggagcactacccatatccaaagaagaaaccagcttgtcagaaccgataaaatagttgagttccgagttccccgatgctatctgtatggaaacgctcttctccgtccatcccgtaatcacttcagtaccgtcacagaacacacggttgtccgctatcagtacagccctccgtttggtctttacttcctttatggagttaagcctatgcaaatgattatacaaccgggcattaacggcattggttaaagccagttctatatcataggtatattccccattcttggtaaagaacggattttcacgcttcacctgtatctcaacagccgcgggcaacactaccgataccccatctataaacaactcagtcatatcaatctaccagtttcaggccaatactcagcccattaaacccaccaaaaacatcatactcccattcggtcagcattccatctgccggactcaactcgccacatacgaagtccattgccagcaattctttctttaccagctccataatacgttgcaacagcgcataatgctgcaactcttcctcatccatttcttcccctgcaggaactttctccagcagaaacaatagtacctggttggattcctgatggcaatccatcccgcctttcaattccgcatccgggaaattaccacatagccagataccctccgcatccttcagcttcttctgcaaatgcccttcccgtactgccagtataatcccctcaatcggtttttccgacctggcattgacacgctgcctgatttccagcagcatctccctgtatcttacaatatcaatcatagcctatcaaattattctgctccggatcagccagccggaagctgaactccactgttttcaaaacactcttgcgaaattcccgttcaaacttctgtttggttaccacaattggcaaccactcattattaacaagaatgcccgcttcctgacaattaagcaggttatgccacagcttataatcgctttggaagaatatacgcccgctgttaaccgtatattcatccgtaaccttaacaccgaactttcggtctaccccatacatggcagccatatcactttcattatttcctgccattttcaggccaccggtagcagtcagtgtctccggcatatcatatacatttttaaagcggaagcaccatgcttcagcatagcgtgtccggtctatgacaaacagcagggaaccgcctgatacctccactttgtattgaagaatgtccggcttctcaaacagagaggaaacgacatccggactcgtatcgaacgtataaaccccatcatcgttactgccggcagctacgaaacgggtttcctctgttccgtcatcccaataggctgtcacattcatccctttctttccggacgcatcgaccgggaaaccgcttacatattcctttgctccaggatacgtcactttccggtttacctcactcaaacagcccggagcttccgcatctttccgggtgaccaaacggctgaacatgacaaaacaagtcatatcctccactccattgataagaaacgtgaagtctcctgccgcatctgtctgggtcgtattctccccggcacaccatactccccacaaagcgagttcacagaacttgcccaatccacgggtacgcaccttaaaatcggcatccggggaatattcctcttctaaaacagtcttcccgccatacctcacggaaaaggttatagtactgtccgtatcaataatgtactcacgcatggtcgcgcagaactcccttggcttaggtctctgtatcacattcataaccggcagtatttattccgttcatcatttttaggaagcaggtcatataccggaattatcccgtcacgtacccgcttcatttcatccaaccaaacagcagcatcgtcctccatccattccgctacccgtacaatatcatccgtatcggctatccggctgtccgccattccgttttttgccatatagccgcgtatcaccccactgggaaatatacggagcggaaggcgacgtaaagctgccgccatagcaaacagtgcaacagccatacatgccgcataatgtacatcactctccggaaccgttttttctgccagcagttcatcccatccgtcaccataggcacgttccaccttcaaccgctgagcttcacgaatgaacggtacaagcacgagaaacgtgcgctcgctcttctctatcggaaaatacatatcaaaggagtttccattacgaataataagccgttgagtgagcttataggtatccgtctgcatccattcctgaagcccggttttgttcagataccggatgagcgcatccacggaacgataatattcctccagatgtaacgcgtcgtcacggtcaagctgccattcccagggaagcttttcactgttatccgttgccatcttgaacttacggccatcatcttcatgactgaggtcgttcttctggtacatccggagcgttgccattatggcaatcggtcgctggactttccttaccagttcattatcctctccgttctgataatatttttcagccaattgcataaccggttcaccaatcaatacggtgagttcttcagtcgcaacttctatgtctccggaaatcttggaaaaggagttattggcataatagctgcctgtgagttcccgcagttccttagcaccatttttgttcttattgaatatcatataactattgtttaagattccttatcatttcatccgcccgctgtttatcgtccaacagcttcatcataacccgtagcagtaatgtatcgtcagtcgcatccgcattgccgaagattccgctttcggcaactgaataaagtacactgttcatacccagactttgagcggttcccggctgtacatccgaacttttcctgctccgttcaaataccggagcgaagcagagttccaacccgtcgatgataaaaactccggaaaacaaatattcacaaaaataagcgaaccaggcgtaaacgccccattgcacccattcaggcatatcacgcaccaaccccatataacgggacatatactgcatacggaacggttcacgtaggatacaccccttatccttgaccggtttccggtagagaatggcgcacaatgcacgaaggtcggcagcatcccggcctgcattgtacttgttcatcacggccaccgcctgacgaaattccccaaaagtcaggtcagctccatggctggccggaccacgaagataccgccacaccggaagaagattctccgtactgtcataagtcagttcaacggcatcttctccaaccttccacatccaacccaacgtagccgccaatttatcaaccaacagcatatcctccactttcgatttaaaacgataccctctattcttcagaacataggcacaccactcacgtttcacatcaagtaaagccactcccggctgtttcatcagcctgctgcgtatcttgagcaagtgaagccactccaacggcttcacttcttcccaacaatccggaaaatcaatatccttctgtttcataattcctatacctgattagtcggtctgtccggggccgacacgttatcttccttatttatcactttccgatagataccgaggaaaatccctttcttatgcgggaagtttatccgtatggcatcattgatagcctccagtgcaatttcttccggtatctgtgtatccgcaccgtagaatatcttgagggcatacaacatctggcttccgctgtcactcttaccgtcaataatgatattagccaatgcaggggaaagcccaaaaccgctggtcgtagaactatctgcaatccgggaaatcttcgcctgtgcctcgatgtatttgtcgatattcatttcaatcggttctatcttccaactctgcgtatgtcctaaatcatccatgaaatccacgcagctaaagaacttaccggcattcttcttgcccgccatgacatccgcaatagcttcagtcagttcgtccttcaatctttccatttccttctgaatcttcgcttcatcccaatcctcgtgcatggtcataatcagttcacgcttctgattccagtactcttgaggactgtgtaccacataggcagcggcaatcatattctcattcaaatgacgaatgatttccggcagattattcgcattctcaagccagggaactgaaccataaaaacaggaaatagcatacatgctcctaccgaaactacgcatgcagtgatatttgacagccgtctcatatttggtcggattccatttgtcaaacttcggatatttacggaaagtccggctccggaaagattcaaaatcgcctgtgagaaactctttcacgttttccagccgccggctgtcatcatccggccaaaccaaacgggcctccccactgtgcagggattccagccgctgcacccatggccggccgatacgcactcccttgcccatatagtacttggtaaaatgcccgttcatgtgcgtatattccaccagattattacgaatatattccttataatcccagctatccagccactgttgaatttcatcatcctccaaccattcctggatacgttcattattctcaatcctcacccggtagagcatcggcccctgaccgtacagcagtcctgtcttacggtccagaatgccaggtcccagattatttttctccagcaaatcacggatcgcattcggcatgttattatccgggccccagggaactacccgaaccccggccaccgtcacaggctcaccgtcccaatcctgcgtccctgcatcaaagaactggctcatgctctgactccagttcatattaatggcatattgcccggcagcagtatccacaaagctgaaattacctatcttcttttttatatcactcataactatgtattaatatatattctcgttgtattcacaagcagggtcccgcagtacttcttcacaatctccaccagttccggaatatgctgttcaataacaggattaaaccagggcttcggttctctcttccattcattatccgtcgttttggtgagaatgcgcgtaccattctccatattgtaccccctaccgacacccaaatgtacatacacgccttcagctttaaaaccaaacccgatactggttatctcctgcccgtccataggtgtcttaccatagtgacgataattctgcttcaatgacttggaaagcttcttatccgtatcaatccagcgtgctacagataaccgcagcgcatcgtcgacctttttcccccatgctttcacattcgcattaaattcagcaaccgcctctttattctgctgacgctcgaactgctgcgtataaccggcatctccctcgataacgacatcaagcggataacggttaccgaagaagttgcttttgctccgccagcttccacggttctgcccctgcatcattctttctgcgtgtgcccccattgctatacaattaatccgatacaaaggtatcctgaagcattcttaagaaaaaggacataaaaaaagccggctatcttcacagaccgccgactttccaaaaaaaaatgtaaaaaaaaatgtttcttcaaattctaataaatatctgtcacggaaaacttggccaaaccgccgtttgcaccagtcagaatattaccgttatcatccgtacaggaagctatgtggcgcataatataatcagcttcgctcatgcctccggccagtaccgacaaggcatccttccgcgaataatctatcgtagccttaaccgtataatgaatatatttattctgacacggtatctccacatcaatacagttatctgaaggctctattccaaactccgaccgcaattcctctatctgttggaacaatgcactcaatccatccgacaccggaacctgaagctgatactctattgtgtatatattcttgctattctgtactgcctcgttcatcttacgcctcctttctgtgccaattcataatacttgcctccctttatgactgtcatgcccagcctgggattacgctcgtatatctccataagtctacccctaaggaaacctttttcaaaagtaagctgctgtatttctttgtaatatcgcttattttcgctacaatatcgcttattttcgctttccagaaatgcgatgtattcgtccttagtcattccttaccccctttccggcatttctttgccttataaacgcacaaagcagtaactacaaacaaaggtggaaatataaaccctgtacaagctgaaaggatagcgccgaaataccagcggtcagaagaaccctgtagttcgcagtctggagccaggctacgataatagcggccttgcaggttattgacttgctcattcagagcattgacacgttcgggtatatgtacccctgtggattgcggtgcatacaatgcacctgaagttgtttttttcattttggaatgcaattaaaatgaaacaatatgtaataaaaagacgggaaagggaacttctcccaaaaatcagaaaacctataaacaaaaaagttccgctttcccgttgcattccaccttgaacaggcagtgggcgcattaacgctccacacgggggtcggaacttatatgttaaccattggacataaaaaatgccaacggcaaagttggcgaatctctccgcctgttcaaaatggaatgcagtgcaaagatgaacattttatttaatatggcaaaagaaaagcggagttttttgctccgctttttaaatcatcaaatacctttataattaaagagaacctttaacatctcttttttcgcttcttcataaggtttctttattaattttacatattgggactcaacatacaaattaacgccagcatctcctatattggtaacaagtttatccctacaatcatctcctatttgcaaaatttttccatacaaaccattatcaacagcagataaaagatttataaatttttcatttaactttttaaaatctgcttgtatatcagattctatattccttttattcgcctcttttgttttcaattcatttaaatgcaactcaagactatcaaaaaaatcatatacaaatttcaaattataatctagtatcaaagtcttaagcaatgcaatttttctatcggcctctttaaaattatcttctttcttatttttcaatttatgtatcgtaatagcaaaccaaatattgaagagagctatcaaaaccatcgctatcttatagacaatatctaaccagtctgtccaatgaacttcttgtaaaacaggtgaaggagtagctatagaacataaggaatcttttactactgatatactatcgataaacaccatattcatttctattatttatctaaacctgttttattttgaagaattctttcaacagcttcatctaaagggccttgcaaatcatagccattcgtttccaattctaatttttgttcaataatggaacgaccatacttttgcacaacatttctaaataattcctccaaaaaagacggagttatggaatatatatctttaggaatgattagttttaccttatcaaaatgttcaaacaagtcatttaattgactcttgttacgaacatcttctccacgatcccttcctgtaaaaactttagattttacgctcccaatttggcttctatagtcctctaaatcaattatgttattaattttgttcattattcaaatcatcatcgttaattaacaactttgcaaagatagctgttccagggaaatagttaggtactgtatagacatattttttatccggtacatctgttaatttacccgacttattaaaagaaataattcctcttgaagtgccattctcatcttttatatctaccagcttataagtaccatcaaattcaattcttgtattgccagataaaagatacatccgcgaaatattatcagctttatcatttcctttcaatttaaaaaagctatcaataaattgaattgtaccatttcctcttttacatatttcttttggaatgcaacttactccctcttgcaaggaatatagcgtccacaatgtttcttctgtaaaggcatcttttttaaaaatattacgagatttaaaactgtctgataactctttcatttttgccaaacagtcaaaatttatagacgaatcttcattgggatatttaaatttctcataaattgtttgtccaaaattcaaaatcaccaaattcagcataccaaaatgtcttttaccatccatacactcctcaaaataccctattaaatatctatattttaatgaagaatgttcttctgcatttattaatgtttcgcctatgacgcaacctaaatctctcatagcttctcgactaagtttttttttcactcttttcagacagctatttacataatccagtaacgttgtggtatcaatttctttttgggccagcatactttcatgtccgagtccctctccatcaaaacaccttaatctatatggaataatgtctttatataaaattcgccgttttattaactctgtaggcgagcccacagaattaagcaacctatttacacttttatcgtctatattcttacctcctacagaagctagtctaacatacttattatatatatttccctttttgcatttctttatgaaattatctatttccaatagaatggcatccaaaaaaacttgtgttaccaaatctaccttcttacactttttataatcaagccatatttcatcacaagtttgatatataaatgcagaaataatctgtcttaaaagaagatagctttctgtttcattttctattatagagaaacattctggaacttcaaagttccgtaccttcttagatttttctttttctaatttttttatataaaaagggcttttggtatcataaaccaaatatgataaatttctaggcagaaaaacgactaaagcatcctcatatgactttattttttttgctgctaacaaatataacctatttttgtcaaactcaagaattccctttttcctgcgtttctttcttttagctatactttttagccttctcctaaaacgtttttcagcaagatatacacttatattataatctatcattaaaaaaatggtgaatcccttatcaaaacatgcccaaaggtattagtgcaaccttaacccgatttcacggattatgtcttgaaaagggattcatgttatatttctcagtatattgaaaccaagtcactaatttttaggagcattacaaaaatgtaggtttattttgacatgacaaaataaaaaagattttttttgcgaaacatccataaaaaaatccccatctttgaaaaactatgctcgccatcagtttacaaaaagaacaaatctcatcggtaaagctgcaatatctacacaaaagaggcttccaacccgtaaaagtctctttgccgtcaaacaatatagtatatcattatcatgtaccaattatctaaaatgatacagcctgtaacgaactgccaatgtcatggatagtatccaatatcagcttcttacgttccggtgagggcgttttcgttccctttatatagcttgccaacaaactctgctgaatgcccatcctccgggcaaccgccgagatattcaattccggatgtgaaaggaaagcatcctgaatgccaggggccggttctttggtatcatcataatagaaactttcatagctcatatcttcgtctatgtcatcccaatggataccaaacggttcaaattcatactttgcacgttgctcatcggtagccactaacaagcgaggatagaatttcaaagattggtacaaagtctcctccttgtcattggttacataaatcctaccattctcaaaccataatttaataatcttcatatcaacctccttctttatattgagaagcatgggggattaaaaatccccatgcaattttttccattcttcctggataacttccagattttcctctaaaatcgctcttgccaaactcaagtctttaggtttcatacctttgttctctatcaatttgacttcgtctctgatttcaaacttggcttgcccgtcttggctggtgacatggcaatgcggtggctggtgttccgctgtgtagattttaaatttcaatccgaataaaattaaaactgttggcatatcatattgttttttgattacactacaaagataggatataattttatatcctacaaatattcatccgataaaagatataaaattatatccttttaactttaaacaaatcccccgccgtggttgaaggaacggaaaaataaaaaaatacctctctgcccggtacatcctttgaatagacaataccgggcgtacctgcataggtgcaaaaaacagacagaaagcactgctttctaccgctaaaacgcgaaaattccgtgtggttaagtttggttatgcctgtaccctatacagtatctataaccaagcgtaccacacggaattttcgcgcgcccccactcctacgggcgacttcccaccatattcgggcgtttttcaaccgagaaacgccctttagaaaactacattccattgaaagacaaagaacaaaccccattcctgtgataaaatcgcaggaatgaaacagcttgctgcccgagccgcgccgtcgtccgtttgcaatcgcagccgcccgcccgcattcggaaatatgacaaaatatttacagtcccgtagtttcgtgcccgtagtgcgccctatcccacccataccggcacaccatacaaaaaagccctgctatcctcacggacaacaaggccaggctaaacgaaatcaacaaaaaaaagtgttatacagaggcagcacccgatacactcctgcctatcctccacacacgaatatattcctttctcaatatgaaatatttcagtgcatccgtcaagttggtagactccttaggcagtctgtgcgtaggcaatttatccccagtcttctgcttgactatcagactggcactgttaggaccgctcgctattttggtttccgtcacttccatttccgacttaaggttcggacaattatattggtctatcaacaacaaaaacagattgcgctccaggttcccgctcagcaagtccataaagaaacgatattccaggttactgccgatattcccctgtcccaaagacattagctgcacttgccatccggtacgattaccgtcagcatccgtttctatgttcttctttatctgcgtagccatatccgcacctacccctttgtagttgttcatggcacggtcataatacagcttcagtattttacgtctgtgcggtttgaagtagtacagaaacctatccgccaacacacgcacactgttcggtggaagcgtgtacagttctttcatcacgcgcatgatatgcccgctcctctgcccaaaaaccatggaaagcatattgcccgcatccatgcctgcttccagaggcttgctcacatccaggtaacgaagaactgtacagtcctgttcccacccgaacggatgccgttctatcacttcattcagatagccgtccgaataaaaatgcttcatcgccagattacaataaaacatctggccagcctccaatttcggaatgatggaaagcacattgcattccaaaccctcaagcccttccgcaaactcatccgtgaaccagtcctcacccaatacatccgcattcacataggaagaagatatgaaaaaaaacgatacaccacgacgcgtctttatccagcgggcttcccagcgtttcatgttctttccggcaagttccagggaacgcccggcggccatcagctttgcctccaaagacctatcggtccggaaactattcttcagctcattataatgctgcaggcaggccaggtattctcttttcgtctcattgtagacaaaaccggtacgcagcatcagcagtatctttttcttatcattctgcttcgccagcttcaaaatccagtcatattcgcccaaatggttcgggttcggcatatcggtcgtaagggtacgactgcgataccagacactgtccccatacttcacccgaaagccacgcaccgccttcagcaagttcgtaaacttttcttccgggaaatacttcacctcgtccccgaatacgcctacataagagcgtcccgcaccgattgccgggcggtccaatgagataaaagtgaagttaaagccggtgtagaacaccattgtatttctccaatcggagcatacgttgtacatccgttccttccactcctgaggcggttctttgtttatcacataatgtctgtcaagttcccaccccagcatagacaacccgtcaataagagaggggatgatattcttgtgcaaatccgaataggtatccgacacccatgcaaacggcgcacccggacaatcgtgcgcaacttcctgcacccgttccgcaagcacctgcactgttttggcagaagcacgcccggcaacccaatagagcgaccatggcatcataaccgatatgagttgagccatccaattggaatagcgcagctccacatcatccaatatctttagttttttcttcctggtcatcgagcatttcttcaaaatcaatatcaaccacattggcatcacgtttcaaccgtaccttctccctggatggcatatccggcatcgagtcaatctgagcagccaacagattccggttggcagaaggaagccccaccttttccgggtcaaggtcatacaccttgaaaggcttctcatccagttctttcggcttcaccgggtccggtctgtcaagctgcttaatcctggcagcctgtacggtcagattgccgtacacttccatgtctttggagttaactgcgttctgaagaaccacatgggcagctttcatcagattgtcaaacaccatgttccggtgcgcattgttctctatggtatcattcaggtagaacagattgatggcttcactgtacatctgcctggcacgcatccgttccacattaaacggctcgtgcatcaggaaagcgattgcattgtccttaccatatttacgatttatccccaccagggcatacagcgcattatagtaatccaattcatcaccggtcagttctatcgtacatcctgaagcaatgtagtcctgcaaggtctcaaaataagatttttcaaacatcagcctatatcgtcataaaatatcttactaatcgaattacgatacccggtcgcctggcggaacttatcaaaccgctgcgcctgagtcacgttatcccccgtctccgcactggcagccatagccaaaccctctttggcccgttgcaacaactgcccacgttcataatggtatttcaacggagaccctacaaggttgaaataccagataaaatccgtttccggaacattgtaatacattgcaatctgtttcggctcataaccgataccggccagccgtcccagttcatccatgtctatccggtcaaaccatggcggatcttcacgccattttaccacttcgtccgctacgaaactcatacacttccttgtttttttaagaatacatactgctcttccattgcattttccccgtaatttcccgacccctcaacaacaaaataacctgccgttgtgtcaagacaggttatcttcttatgactccaggagaaagacaactcaatcgttccttcccggtagagctgcatcagccgttcaaataccttcggcatccggaacttaatcgtttccgaaatatggagatgaatgacgccgataaatcctttttccttccagcggaacagcgcattaatgatacgctcattcgtcgaataggtcgctacatacaaatgattcacctgccctgcatgctttatcagatacacaataaaggtaaatgccgtaaaactcttttttgtctcgataaaaaacgcctcgttttccttaggcaaacgtccgcataattctttcaagctattcagcttgaacgtcaacattgtttcaaaacgtctggtgaaaatacgggaatcggacatttctttccggagttcctccaaattaaaataataactcattccaacagacgatttatatctgccagctccttctcatagccggccaacctttcacggcgaatcgcatccaaatgcggtttatcccctttcgccagttccgacttaacccgccaaatattattctccacctgtctcagcctacgtaccagttccttgaccggaagtttcagaagctcactcctgcggcggaactcggcaaaagccggatgtttccccaacagcgagtggttttccttgtaatagttcaactcttcccatatcatccgattaccgatatagctatcaatcagttcacgactgacagtagcgcattcttccaaagaggtgcaatcgcgcaatttccggtgtaaccgcacataagcatgatacttgctgaacttacgcgaaacaagcgcttccagctccatggggcagtccggttcattcaggaacggaaattcttcacggaaagagagcggctctctccgtgaagcacttcccgtaagctcccttcaattctcaaaatcggaagaaaccgggaaacatttatcaaggaatttttccaaccaagaagaataccccgaaacggtattgttcataaacaccttacgggataagatatcaaccaccttattctcatccggactctgcgatactacaggcagcaacacctggtcggttttccaatcaagatacaccggctgtgtcggatatggatgggaattataataaacagaagtaaacaggtaacctcccttttccaattccgggaaccgttcaaacatcgcagtcaaccgctctttatcaaataataccggagtatgggtctcataattcaggcatggcaaaccgttcttttccaacaacattgcggtctgtttcatattctccgcataaagtcccttgaatctcatcggaacaagcttgcccgatactttaggaagtgcgatgtgtggcaatgcaaccggattcataacatagatatcatcattactccagatgaaatatccggtcacttcaggagaagctacagctattctcaatttagcgagtgtatcaacctgcgcattatcggatacacgctgatgctcgataaaggtaatttcttcgctgaaccaagcctcacggtcaccgatgaccaccacattgattccgaaacgtacattctcctgccaggagcgtaaagcatacagcagctctctgccctgagcaaattccctgcaataaggaataacaaccgttatatggtcctgagccgtagcattcactttttccatttcagacaaagtctcctgttccggcgctgccataccatcattcacatctgcatgggtggtatccacctttgttaactcatctttttcagttttctttttcgttgccataatttatttttttaattcgatacaaaaatatcccctatcaatatcctataaaaggacagagaggcgcatgccaagcaaacgcctctcctataaccaacctttaaacaaaactacattccgtctccgtcagacgacaattccgaagcaggcggcaatcctaaaacagcgttgatttcctcgctgtccgttgccggaataaggctcttggctatatgaccgatagtgccaccgcgtaaagaactggccagatttatggtattcttatccccttccttgttatcctgagaatccgccttggtcatcttgagcggagtacacggtgttccggcaatcttcgcatcatcccccgaacacccgaaaacaatcgcccccaggttctcgttgatgttgttgttaacaaactcatcatgttccagctccgtacccggatgctcataatccacgtggtgaatgaatccgcgcgcatcatcttccccctcactggtatgatagatgtttattgtagaatccgtagcatacaccgctatcggttttttaccttccgccatttcaaaagcggtcaccttcacgcccttttcatcacgggtgcaggtcttaacgtcctcccaacggaaaagcatgacataggacttcttccctttcggacgtccggcgttcgatgtctttttcggtactgataccattgtatagttttcactcatatatacctcctttcatttcaaatgccatcatcagaagccgaagaaacagaagcctcttctgccggcggcagataagcgaaaatagcttcagccagccaaaatccggtagcctcccaccattccgcaaaaatcttcacatcgtaattctctccctgcatccaaacttttgcgctctgagggtccttactgcgcagatgtttgaagttctctttcggtgtgatgaagaacacacccgtacctcgcatgccttcaagcggcacaaatgagaacttggaaaaatcgaccttgattttctcaccgtcctcattcttcagccaaggatattttttacgatatgccttaccataacgtgttaccaagtccgggtccgcatggataaacatggattttttcttgtacagaggtttcacttcctcaaccgctttctctatctggtcaactagtgtcgcatcctcaagcttctcaccatcgagcagccaggttatcgcttcattattcgctttcttgagtttcttcaattgggtgacataaccgtccatgacgtcattagcatccgtagcggcatcaccgtcctttgtagccgaagtttccttaaactcaccaaccgccaatgcgatttcgcgttcctcgtccagttttgggaatataagctgatacaagatgtatttcactaccggcatatcttccggtttcaagttctcatcatacagatagccgagaatatcctccatgatgtccgacggcgtaatgggaacgttgattttacacttgtagttctttattgtcagcggagtgaacttagacttgcctttaggcgtccacttcggaacgaactgctgaagcactgaatcaatggcagcctgctgcgcacgtacttccgtcttatccgttaccaatgttgacatgtacttcgtggactccgtagtacccatcagtcctttgagtatctcaatccgttccgaagatacatacttcccaaactccttctggagttcagttgtctcaatggtcgagttaccactgtatgccgcacctttaaaggctgcgtccaaatagcggttatgcgccagactcatgtccggtttaaacttattacccatctctgatttacccccatcaacctgctgaccggcatccggaaccggttcttttgtcattttttctatttgcgcatctttttgggcaatctcatccttcagagctttcactttatcatctagttctttcaaggatttacgtgcctgggcaagcgctgtcgcgttactgtcgcgctcccgttccaattccgttctcacttcatcggtaaccgcttcctctgcattcctaccttctttctcaaattcggcgagatcctttttaaaggcttcgacgaataccgccccgtacttctgcttcaactgctcttcctgcgtagaaagaaggattgattttcctttctcgtctttcgcaaaggccgagatgcccaaaaagccaagtaccacgctcattacttttccaaacatactttcaggattttgagttgatataattgttaattgtcatttccgcattgatttcccggctacgccgtacagcataatcctggttaccgatactatctataagtccaactttcagcgcatcttccgcatagaacatgcgtccgcgaagcagtccttcagtctcctgcttcaaacattcaccccggttcttcctgacattcgcctgaaaatcccttgccaacgggtccagttcttcgtcacggatggaagcgtaatcacctttcttggccgcttcaaacggagcattcttgtaatcggaaagattggagtaaatagtatgcaccttaacaccggcattttcataatacttagcataatccggaaagctcatcatcacaccgatactgccgaactcggcagatatggtattcgaggcaataatctcatcacagtaggaagcagcataataagcagccgatgcacaaaggtcacaatgtgcaacaaccgcttttcctttactttttgcataaagaatggcatcgaccagcggtgcaatggcatccactgcaccgccaccggaatcgatgtcacacaaaacagaagagatattagccgagtcagccgcgtcacgaataagggccgcatattccgttgtcccgtaactgcaatacgtaccatacttcagcatagtaccatgaaccggaatgatagccgtactaccttgcggagcatcgctgaagctattgccgagtcttgcgctacgcccatcttttgtcgcaatcatcagcggtatagcttcacgctcagacaaccgaccggtatcctgactatcaaagtcgcgttccaacagtttatcgacaacaagcaggttggattcaacctcccggaacgaaacgaaccatttgccccgacagaccgcactatataaatttgaaaacgccattatatttgtatctactaataaacgatacaaaggtacaacagcgctacccacttaaaaggactttaaatttttggcaaactccgcactatcacgtttaaaagagagggttaatttcaaaggagaacctgcatattccgttgagaacgacaccgggaactggtccgtgcctaccaccttgcagtcaccattcgataaatcgagcaacaccagcccttcctgccgtaccagctcttgtattctccccatattggcttttcccgtatccgtaacaacagccttaagctcttgtttcactacgcctccggacgtatcgcagctctctttaaactctccggaagatattccgataacttcccagtcaccgcggaccctaataaaatccgcacctggaaaatttccaaccgaagcatccgctatcggaagaaaacgcatgccgcatacctgcgaccgtctgtcatcctgattcatttcagttaaaagtttaagtgatattcaattgaaaatccgttttttacttaaagtttaacagattaaataatgttaatcaaaaagggtcagttgtatgtcatggttcacttccttgacaatccgccggcgattacggtaatcatacttcttcaccgcatcataattcaatgcgttggccttgatattataggcagccagaaaggctttgataatcctatcctgcttataccctttctcatagcctgaaacaaagtactcacgaatacggatgcggaacgatgcctcgatatagtcgcgaagcatctgctgtttccactccggaatataaataaaattctctttcaggataaaatggttccattcacggataggaaggcacagctttatcggatggtccttaagggactgctggggcggacggtcactgactgtcaccatagcctgaataaatttgcccaggtcattggccgatgtgacctgtatatattcgtcagttcccctcgtacacccaaattcatggtaaaggaaatcatgcagataaggttgcagttcaatcgttacataaggtttcatatcataaatagttggtttctatgcaaatatagtcactatatataatattgcccgctatttttccggcaaaattcaacgcataaagtaatacatttttgccctctacaccttctacaatttctacaatctgcataaacaagtatatatcaacaatataacggttttattattgggtaataagtgtagaaaatctgtctataaagtgccattttgtagaagaaatatagaaaaactgcattttgtagaaagttgtagaaatgtatagaagtcgtttttatatactaatacattgatttataacattgtagaaagtgtagaaagtgtagaagtattttttccctcaaaataaagcctatattcgagtatagaaagtgcataaaaaagcccctaccttcacaggcaagggcctctctcacaactatgatagacattttaaaacatatatggagaattgccgttttctttcgctttataatgagcatcactttcttctatctccgatactcccatgtcaatattgagattgatgttgtagttctccatcaactcagtatagtcaaaacaaagtgcttgtttcgtactacttgttttgcgatagtactttttaccgtcgacctctacttccttagtgacttcaacccccttttgtatgttcttgaaacggactgagttctgcacgcccaagtattccttagagttttcgatgtagaatttcagtgattcagtaggtaacgcattgtcacctacctggcgggcaaacttcttatacaacataaagatacggtcggtttgcattcgtaaaacagggcgcggctgtttgaataccaaatctttgactttattagtctttagaccggagagataatctatccgaaaatccgcctccaggaatatctcgccatcttgttgcaagtaactgaccacattccagaaattagccagttcgttattgcttttacattcacggttctgccgaatgatgccatcgacacagatgcccaacaggtcccgatacatgaatggtacatccagtacagcttcaagtgtgcggaacgcagccaatggtatcacccagtttcgttgtatgcggtcttcaatggactcgcctttcaagcggtcgtttaaatcatccatacactggcgataattagtagagaaatctgtctccatttttgcacggtgacgcagcagctgtaaagttagatgtgaaagtcccaaatcccgaatgcttttgcactcgtcaaacgctcttttttctgatgttgaaaattctgtttttgtaaaagttaagtatataagtcgggaaaacaaggcaatgtctattgtcggcatttcttgcccggatagaatcacaccgcaatccacacaggtaatttctctttttttatctctgtccatgttcatccggctacggccggtaccatcccaaatccccttcaggaactcccgtttgtcaaggtctatactatttttgtactcgtcaatgtgtacaagagaattggcgcattgagccaccgcatcacccaatgcagcaatggtggcattttggatattgggcggtgtattcttgatgatgaagaacgacatcaggctgtgaccgagttccgacttaccactacctttcggaccgaataagttcagaatggggaaacttttcgtctgtccaacgattatatcccgaaagagagaagccagcaggaagcaaatacccactttagcattatcgccaaatacctgcaccagtttgtcgctgtattccctcaagctgacattattataagaagtatacacaaaccgccgttcgaactggaataatttaatatcatcgcgataaatggtactacatcctggcagatagaaattacctccttgcaggcgtacaataccgtattcatcggcggtatgccattcagtatcgaaacagccattgccatacgcaaagaaaccttgacgctgccaccccagttgagtaatttcaagagctgtttctgtttgctcgtaaaggaacatcttcaatttagtcagttctttctcggaagccagccaaatgtaattacccaacccttctaccttttgtttgaatttggagagtgaaaccaagtcttcttgcttcatctcaataatttcttcctgcttattctggtttttgatacgatacaaacgtttggggagcaaggagtctttgatatgaaacataggcatcataataaagttactccactgtaccggcttgcctgtttcaccagccaatgcaaagtaagcgttgtactcttcatagaaaccgtatttacccaacaggtcacggtctattttcttgctctcactaataacctgctttgccttgtccagtttcttcgcgcggttaatggccgtctgccacagttttttatcttcataaaaagattgtagctgcttgaggtacatagattcttttacctcgtctttgaccatcacaaccattgcactaatagtattgatggcatcgctccgctcttcggtagtgtttacatcctgaaatatatgctgggcataccaaggaataaaatcgacctcctttaattcctgaaacttctgtatgcttgtacaataggtatccgggtcattcttgctctgcgcttctcccaggggcaactccttgaccgatacacccagtccggatttcatggccagcaaaccgttacgcatcgtattgcgaatacctgcacctaatttttctcctttctcaaaattaggtgggtctgcatcaggaagaaaacagaccttggtcgcatacttcttaaactgttccatctgactttctgtccatgctccgccaagcggtgccacagcattattaacccgaatccgcttcagctgcatcgcatcgggagcaccctctaccaaatagaacttatcgtctttggcagcctgacgtatagccgtatcaataccgaaaatagaatcctgtttatggtatatgtcactttcgttggagtttatatatttagccgccgatttatctccggaacagtcacgagcggtgaagcctattatcctacgaaacttgtcacgaatgggaatcattatgcgattacgataaccatcatagatattacctctctccccggttttcaacaaccccatctctttcatcagttcaatggacaagctggaaacctgggcaaatttgagtaaatcatcccatttttcaagagcaaatcctatgcccatctcttcggagaattccatcccccagcggcttttgacatactcaaacgcatttttattagccttgtcaagcagatttttacgaaaatgttcggcgcatctttgattgataacgaacatactttctcgcttcatccgtgcttgctcttgctctggagtcagtgtttcttcctcaatggtgataccgtaacgttttccaagtgcacggactgcctccggaaaagtcatggtttcgtgctccatgagaaaacctataacgttcccacccttactgcatccaaaacagtgccagataccacgcgccggattcacgacaaagctgggtgtcttttcttgatggaacgggcaacatgcctggtagttgatgcctttctttttgagttcgacatattcgcttatcacgtctactatgtcggcacggtcgatgatttgttctattatcctttcgtctatcattgttatatctattcggccctatctcctgaggatgacagtgccttgttcttctaaatagtagctgtgtactccgtataagtcaaactcgcacaaacacgaatacacacatttcatgaaaaggtcataattctccggactaaccttttcaagcacccggaaagattcaccaggctgcatcccatacagcctgatgaacactttattatagtattccgccaatttctccatccccattgactcgatataagacgggatccaagattgactattgtctggaaaatattgaaataaatccatattctaagcattgagcggatacaaaggaattgttttgcaaaagagttatcaaggacgttatttatatgttttaaaacctctgcacaacatttcggccatcataatgttgattccgtgatgctccttgaggttttccggatttttcccggtcaatgtcacactcaaattctccttgcggtaatcacgctccacatcaaagtatagttcctgtcctctgtcatcgtggaaagttatccggcatctttccaccaatccacccagttctgaagcgtccatccacaagtccggctttttatccatcttcagatggcaatatctgtgtactttaccactcttacgaatcagctccacttcgacgattgtcgctatctgatttgtacgcaggatgcgtactttctgaccttttttcattgatatttcctttttattcatttctatacagttttatttattttgtcatttcatctttatactgtttatattcagccccagctatctccgtttttatgaaaatccaaaatggctttttgtatctcttcatcatttttaggctcatgggtatatctctcatggcaataacagtatttactgccataagaacaggtattataagttctattcaattcctctccaactctccaacgtgcatgagggtcaggaattcttccctcttgtaaccattgccaatgagttttcattttcccccggtattcggcattctgttttctcttctcttcccgtttcttggctacatcccgatattccttccttttggcagagaggatggcttttgctgcttccttatcttcatgtacttcacagtctttgaaatagacagctttggcagagtaataacaattagtccattgttctgtaccttccgccccctcattgggtataaaaccctttttagcccattgtaatgccgttaatatttccattgtccattccttttcattttctcggaagtatagaccgttatccatttattggaataactgtaataaagcaatcctaaacccatcattccgcacatttgtaaaactgcatcttctacatgctttctgctaaacactacttcggtttgcaacttctggactttaacatccggaaacttctttttgaatgttgttttagtaaccatagaacatcagcctatttttgtaaattcacgtattttacttactatggcataataacctaatactttcttataagatataatacagacaatgctgtcgctatcattctctacaagaatggtccattgtccatcttttccactattaaacacatccagcagcacagggcggctacgaggatatttctcattcattatttttatctggtgctcgatgtcacatttcagtgcatccaacgaacattcatcagcaatcagatgccggtcgaactgtcgtacaaatagctgtaattcccttcctttcttattgacactggcataagtcttaatattatctataaagaagtacatgattatctattttaagttataagttttgtttatcacctcacaaagagtttcattcaaatcgaaatcatccggatagtctatctgtacaggcatcatcagagtgtcactctcagattcccggaacatgattcctttctgtacatgtaagggaagctttttatttcttatctccgcttccaatgcctcgatgacttcaacattcaactcacaatccatagtcatcatggcctacaagatattgctccatcaattccggaatatcctctatcaatcgctcaaatactccgtcagaggattgaacacaaattaaaatcaatgtactgtaatcctcgtctatcagccggacttcatctgcctgcacataacctaatgtgttgatggcatctacaaatggcagtttctgcttcaaagaaaatccacaagagcagattatctttccggaagccgtcggtttattcagccacattctgaatttaccgtccggagtggaaattgaggcatagcctctgtctgtttttcctgttgtcataatcttcagttttattggttaataaatgtgtcccgtataggggaatcgaaccccaatcgcacctatatgtcacatattatccgctaccattcggacgtagtacgggatttcggctgggctatcttcacagactgccaacagcctattcatagtaatgttatcatgacaataatcacacatggcgcgcctcacggcgaacttatttcatttggttctgatgccagtaagaaatcatctcacctacattacgtaccttaatttttgcttttatattctccctgtgacgattcaccgtacaaggagaaatatgcagttctgcagcaatgtcatccgtttggcagttggaagcaatcaagcggaatacatccatttcacgctcagtaagccgagtatcaagttccggacggcaaatcacatcctcatcttcacattcacctcgcagcggacatttcacttcctcgaatacaaactgaccgtctttatttatatcgagattatattggtcatattccccaaaattgcaacggatgaaacgatgaaccacccggaactcataatgccacctattcattgtgctggcagaataaatcttcatcaaccgggtatgagctttcggatatcggtccctgataacggaaagcatatactcaagggttgccctatcagtatccttgagtacaattgccggttgtccaaattctttcatcatgacatctccttcaggagtgttatagaactcgatattagttattggattcatttttagaagggaaaagttcttctacactcatgccaagatattcggctataatcttttgcttaatgggagttggtggattaaccccatttatccaacgatacactgctgccggagtggaacacgtgatttctgccaacttcttgatagtctcttgctgctgattaggcaagcttttcatatagtctgtaaataccataattgataaattattaaatgtttctattgatttaatctcccgtttaactaacttagctacgtgaatttattaacatgatgcaaatatattagagtttttctaaatatcaaaatttattattagattttttctaatattttcagtatggagaaaacagatattgacagacgtattattgaatatataacatatcttactgatattaaagtatataaatccgaagctgaatatcttcgggctgtaggaatggcttctactaaaatatctgaagtcagaaaaggaaaggttagttttaggcctgatgaaattagaaatattctaataaatagtaaaactctaaatgcgcattggataatgactggagaaggaacaatgttccaacaagaagagaacaaggatatttcgttggcctacgcaattgacagatgtcgccagcttgaaaaagaaaacaaagagttgcttttacaagtaggagaactgactggtagaattaaggaaattaaaaaagatgtcccaaaggaaaacaatgcaacatgtgccgatgcaagcggatcagatttggagaaatagaatatataattaataagtattaaaatggtagagataaattaccaaatagtcaatgaaggcatcaaacgcttcagtgaatattatccggatggtaacgattggggagatgctatgtatgaatatcataacggagactacgagcaaagccagcttgcactacagttcctaacagaaaatggaattcttgtgccagaaggtaatgcagaaaacgataggcttatgctaagtaatattggtatcaacatcatgaaacaattcgatggtaacattatcaaatacttggaatataagaagcaaatgaagcgtaaggtggaaattgagcacgaattggagataaaagtgcaacgttccacgctcaagactaatagaattcaaatgtgggctacatatatcaatatcattattggcattatcaatgccatagccctaattgtgaactttttcaattaagactatcttttagatagattaatatattaaaaattaggcatataatatttatacccaaacatattccgttcaaaagaaactgtaaatctctattcataatctcgtttttctgcaaagaaataaaaccaaaatataaataaaaaggacattataaaaaataccaaccatggaaaagaaaccttattcagcacttcagcaacaatctttagatgaaaccaccttctatatgacatctgcaattaacattatcaacaaaaaattgggcgaatcctatgcggagaatcaccccgaacttttgggagctttcatgcagaccaccgctattgccaatttggaatctgttttactgaataaattagaagatattgaaaaagtaataggtaagaaacagtaaataaataaattactttcattatcctcggacaaaattcggacaaataacctattatagtaactgaattgaaaagcgtatttgattaatattcaagcatgctaaataattagaatttacatataaggtcaggcctccgcaactaaaaaaagatgggtcaacgtaaaaacctgagggattcatagcttatgcataaattttcgccagtctgaacaggaagaaagctctgtcctttactcctctgaattgtgtgcggaactcctttatttttgcattgaacgattcggaagcagcgtttgttgaacgtctgtcaaagaagttgattatttcccggtaatgcatctgtacggaacgtgccactcttccgaaagcaagaaaccctgatttttccacctcgtcataccagcgggcaagatgcgtcaatgccgcatccttgtacctgcattggtggtatatcagtccgagcctcatggagaggtagtatgctttcttaatatcgggatactcccggaacaggatgccggcgcgtacgcgctgtgattccgtccacaaggattccttcttatataacaggtaaatgcttctcgaaagaagctgtttgcgtgaatcaccgttttcaaagaccggcgcatgatatatcttcccgcaggctttggcatgggcgatctgaacggattcttcgtccaaagcctcccaacgtgctttaacgcgcatatcctgaaccgcctcataagcgagtttctgcacatggaaacggtctgtgacgcggcgtgcggcgggaaaacagaggcgggcgatctgctccatgttcggagccatatccatggttatctccctgacctgaaagcgtctgcggcgggaaagacggagcagtacggaggtcacggtctttacatctgttcctttcacaacggcgataagactgcccgaacggccttttctctccttgtttatcaacacggtatataattctccgcgggaaaggcagggtcaacgtaaaaacctgagggattcatagcttatgcataaattttcgccagtctgaacaggaagaaagctctgtcctttactcctctgaattgtgtgcggaactcctttatttttgcattgaacgattcggaagcagcgtttgttgaacgtctgtcaaagaagttgattatttcccggtaatgcatctgtacggaacgtgccactcttccgaaagcaagaaaccctgatttttccacctcgtcataccagcgggcaagatgcgtcaatgccgcatccttgtacctgcattggtggtatatcagtccgagcctcatggagaggtagtatgctttcttaatatcgggatactcccggaacaggatgccggcgcgtacgcgctgtgattccgtccacaaggattccttcttatataacaggtaaatgcttctcgaaagaagctgtttgcgtgaatcaccgttttcaaagaccggcgcatgatatatcttcccgcaggctttggcatgggcgatctgaacggattcttcgtccaaagcctcccaacgtgctttaacgcgcatatcctgaaccgcctcataagcgagtttctgcacatggaaacggtctgtgacgcggcgtgcggcgggaaaacagaggcgggcgatctgctccatgttcggagccatatccatggttatctccctgacctgaaagcgtctgcggcgggaaagacggagcagtacggaggtcacggtctttacatctgttcctttcacaacggcgataagactgcccgaacggccttttctctccttgtttatcaacacggtatataattctccgcgggaaaggcagacttcatccagtcccacataaacaccgatgttcttctcgaaaagaagccattcttcggcatgaggaagctgctcccaacagagataaccgctcaggtgattccggtattgccgctcgagcagttccccgtcgaccccgaacagcgttcccaacagcctgcagcccaccggcagcttatcaatataattcttttaaaaaagacgcaaattcatgcgtcatacggctaccaccggcaaccagtttccagtcacggctcacgtaacggttctcatccttgacaacccacctgcgccggcgcacgttcagaaaaagcttcttgccgcgtatggggaaatcctgaaccacaacaggttcgtaaaaacccttgctctcaactttcattcctgcgtattctttaggaacttcattcttttcttctaaataaatcactatttccgatgcgctttcctttacgtccgagatgatgaaataatccaatgtcccttcaggaagaaggagacggtagccgttgttgtccataagatttctgagttagttttatgcaaagataggatttttacaaatattacccctcaggtttttacattgacccgaaaggcagacttcatccagtcccacataaacaccgatgttcttctcgaaaagaagccattcttcggcatgaggaagctgctcccaacagagataaccgctcaggtgattccggtattgccgctcgagcagttccccgtcgaccccgaacagcgttcccaacagcctgcagcccaccggcagcttatcaatataattcttttaaaaaagacgcaaattcatgcgtcatacggctaccaccggcaaccagtttccagtcacggctcacgtaacggttctcatccttgacaacccacctgcgccggcgcacgttcagaaaaagcttcttgccgcgtatggggaaatcctgaaccacaacaggttcgtaaaaacccttgctctcaactttcattcctgcgtattctttaggaacttcattcttttcttctaaataaatcactatttccgatgcgctttcctttacgtccgagatgatgaaataatccaatgtcccttcaggaagaaggagacggtagccgttgttgtccataagatttctgagttagttttatgcaaagataggatttttacaaatattacccctcaggtttttacattgacccaaaaagatcgctgattcagcggtctttttttcattttatcgggtcaacgtaaaaatcctcatctattgacccctcattgctgagaaaagcaaatgaacatagaaattcaaaaaaatcgtttacctttgttacatggctaccaataagataactcccgaagaattatgggcaagacagcagatcagtccgctggatgtggactatgatttatggaatgaacgcagggcatctatacagacattctcacgaatgagccaaagttgcatctttacggtagatgttttcaaagaacgatacgattttgcatccgataactttgctactattttcggatataaccctacatggataaagacgattcagaaacaggggaatttattggaagaacggattcacccggacgaccgggcacaactcatcgaacaccagattgaacacgggcagttcatctattcacttccgcaggaacaaagaaatgattatcagcagatattccaaattcgtatgctgaatgcccggcaggaatatgtgaatgtaatcagtcgccaccaagtgattcagaaagacaaaaatggaaaggcatggatgattatgggagtggtggacattgcgcctgaccaaacacctatggagcgaatcaggcggacggttataaatcggaaaacgggtgagatacttccaacggcagttgttccggcaaaccaacaattaaccaagcgggaaaaggaaatacttttattaatccgacaaggatttttgagcaaggagattgcttataaactgaaccttagcatttacacggtaaacaatcaccgcaagaatatattggcaaaattgaatgccgataatgtgatcgaagctatcaaccgggcggaaagttctggtattctctattagctgaacactggcattttatcctaatgcacatcattattcaatcacttcaatataaaaactaacaggacggaaaccatcgttacacgaaatcatggccgagtgcggattcttcatccaaccgtcataaaagttaccgcctccattggctaattccgtaacaaaatagcgcattgagccccatgcgctttcacacagtccttccggtttctgcccatcgactgaaataaaagttgtaccttcttcaatatcacaagtgtgttcaataggattttcgtacatagccgacaaatcgcgatgttgcacctttcttatagctgttattctaatcttcttcattttcaatattaccacatacgatatgtacaaggttagtcatttatggtattgcagggctactttaaacatatttctattacggcaaccaatctaagctatttgtcagcggattggtttctctccattgttccagttcttcgtaactgcgaaccccacccacgaaaacagcatggtaaatttctatgccgggaatctgcacaccgtccggcacatcgaattttatttgaaggatggtttgcttgatttcaggggtaagtcggttcgtaatggcagcagttgctctttcaaccacaccatcgtattttgagcctttacgaatatgaatcatgtcgaacttccatgtgttcctgtcttcatcctcgtagagaacatgccattcgatgcactcttcttctgtctgaatcagattattatagtggatttcctttaaagaaagccgttcggcaagttcctgcatcacagaaaagctggctgcaatatccaatgtatcggtatagatatgcaggtctatatccctactctttgccaacagaccggatttgagtgagcctaccagatgaacggttgccccaatacgttcccatgccgggataataccggtatgttccagtattttccaagcggtttgctgattatacagggcgagttcaagaatatccatatcgttcattttaagtgtgcaaagatacaaaacatatggatatatagctataaatagccatttcctatcctacccaattgcagtaattttgtgcaccgttcgtgactctattttcatcctttagcaataaattactatggtattcaatcaaacagagaagcaagaaagaagctatttgcagcaaataatcaatcggctgaagcagataatcagccataccgatgtgtccgtgaaagaccatgtagatacattggcggagtacaaagactacctttggaataataaagatattgatccacatgagatacgctccatgcgtgaaagcatcctgaatcattttgccataggcgaaagtgtaattgacaaacgccgacggcttgcccaaatagtggatattccctacttcggacgaatcgactttcaagagaagagcgagaaccgtccgataatccctgtttatatcggtatccatacctttcacgatactgaaagccggacaaccgtgatttatgattggcgggcgcctatttcgagtatgttctatgattacgaattgggcgaagcatcttatcaatccccatcgggagagataaaaggggatatttcgttgaaacgccaataccgaatccgagctggaaagatggaattcatgatcgaaagtgcgctgaccgttcacgatgatattctgcaaaaggaactgagtgctaatgcggatgataaaatgaagaacattgttgccaccattcagcgggagcaaaaccggattatccgtaatgaggaagcccgaacgctcatcattcagggggtggcaggttcgggtaaaacttctattgccctgcaccgcatcgcctacttgctatatgcttttcagggtagtctttcttcaaacgacatcttgattatttctcccaataaggtgtttgccgattacatttccaatgtgctacccgaactgggcgaagaaaccgtacccgaaaccagcatggaacagatactttccgaagtactgaatcacaaatacaaatactttagcttttttgaccaagtgaatgaattactgacaaaaccaacaccggactttatcgagcgaatcgaatataaatcatctttcgatttcatcgccagtctggatcgctttattttgtacatcgaaaaccactactttagagcagaggatgtgaagctaaccaaacatatcaccgtcccggctgaatttatcgaagagcaattccaccgtttcaaccgctaccccatgcgccaacggttcgaggcaatgacggattatattctcgatatgatgaaagtacagtatgcttttactgtgacgactgccgagcggaatttccttaaaaaagaaatcaagcgaatgtttgccggaaacaatgacctgcaagtctataaagatttcttcgcatggataggtaagccggaactctttaaaatgcggaagaaccgcatacttgaatatgccgacatagcaccactggcgtacctgcatatcgctttggaaggtggtacaaagaactatgtcaagcatttgctggtagatgaaatgcaagattattctccaatccagtacaaggtgatgcaaaagctattcccttgtcggaaaacggtgttgggagataccagtcagtcggtcaatccttatggctcatctactgcggatatgattcagaaagcccttattatgggcgagataatgaaactatgcaaaagctaccgttctacttgtgaaatcacagagtttgcacagcaaatacggacaaataccgaacttgaacctgtcgcacggcatggaaagaaaccgcaagtattacaattcgataatgagaaagaagagctgtctgccattgaaaatttaatagttactcatcaggcatccgcttacaaatcacttggaattgtctgcaaaaccgaatcgcaagcttgtgaaatggcagagaaactacaaattcctgatattcatttcctatcaaatcaaagttcggcttttgtacaaggtatcgttatcacctctgcacacatggcaaagggtttggaatttaatgaggtgattatcccacaagtagatgataaaaattatcattctgagatcgaccggagtatgttatatgtggcagcaacaagagcaatgcaccgtttaacgctgacatatagcggaacaaaacacacgccattcatctgagttttcgacttactctattggcgtacagggattgacctctatatttaccgtcacgcgcacagcagagtagctttcagagataagaacagaaagacataagaggttaatcccacaagaattataactgatccaagagagatgaaagggattcagtagcttttaagccccaagtcgcccataagccttcggatgctcttatggtttaacataaaaccacggttatgcatctccgctgtcacacgacgatagccatagcatcccttatactcatgaaaaaacagtttaatcaattccttttcattaatatacctgtcagcagctttaaggcacttcagatggtaatagaacacagaacgagccatctttcttgattccaatagcaagtcaagaggataatccgaccttagttcgtcaatgatctgagcccattcagaagtgcttgggctttctttgcctcgactaaggccttcgccttttttaatagcgcgttctccgctctcaggcggagattttcagcctgaagcttctcaagctcagtttgtggttcttttttctttgggcatcccataggatttttcggtggccttcctcggcgtttggacggatcaagagcctcataaccatacttgcgtactgtgctgactcagcgttgtagtgccgtcttgccaattttgtattctactcttatatgggccaaaggtacaccttttttctaatattaaacgtacgacttcttcctttaattaaaccgtaggacggcaatggggttgttgttccagtccggaacagccatatttgtcccacattctcacccatgccaatatctgagttttattgatatgacactctttcgacaagtgagctattgcttctccttgttttacccggctaacgatgatgagccgttgttcataactgtacttcataaaaaacaccccaaaagttttgtgtctaacttttggagtacacttcattttgaaacagcctctttttcttttgtatacactacggcttgacggctttgatgtaccccccaaaaaaggcaataagctgataaaaaaacaaggcttgctgtcccttttttacgtgactatgcaatggaagtggttgaccaactagaagaaaacaaaaaaggcttaaaaagagaggtgcacaaaataaatatcagacgcagatgatacgaaataaatcccctattttatctgcgtctgaagtttgatatagaatctgtagaatctacttagcgattcggtgtattccactgataggtctcactacattggatatgaatcagctgattacccacctgtattctgaattcaccagcctccagtatccagcgaccatcacttcctacaaacgccaagtcgctggccggaatcttcaacgtcacctgcttagtttcacctggtttcagttccactttttgaaaagcgcgaagacgacgattttcaggtgtcagggaagccaccatgtcacggctaaacaacatcactacctctttgcctgtccgcttgccggtattggttacatcaaccgtaaacgtcaattcatcctgcacattgaaatcgctatgactgcaaactagcctactgtactcaaaagttgtataacttaatccatagccaaaaggccattgcaccgaaatgacagcatcataatcataagctccttccatcttatccatctcttcactgacacgataatcatatgttgtcagttctgcttcatgacgcggataagtataaggcatcttagcactaggattagcctctccagacaaaatattcgccaatgcattccctccgaaattaccgggtagcattatatggataatgccttgagctaaaggctccaaatcatggataatacggggacgtccttcattcaacaccaatatcatgggtttgcctgtagtcgccagtgctttcaccaaattacgctgattttcagaaatggccatttcagacagattaccaggagtttcacaataggagttttcaccaatacaagcaatgataacatctacctgatgggcagcagctaccgcctttgctatttcgggcgtattttcttcagtatacgttccttcagccacataagtaaccccttgctccaaacgaacatgatcagcaccaaactcctgacagattgcctcataaagggtattgtatttactggcaaaacggtcagccaaatgcccctgccaagaataactccaacctccattcaggcaacgcatagaatgagcattaggacctgtaaccaatatcttagtacctttcttcagcggaagaatctgatctttatttttcaacagaatttccgattcctcggccgcctttaatgccaactgagcgtgttcttcacttcccaacaaaggatagtcagccataggtgttatgggctgttcaaataagcccaaacgaaccttaaggcgcaatacacgacgcaccgcatcatcaatacgcgccatggaaacttcattctcctccactaattctttgagtaacgtacaatagcccaaatcataaggttccatcgccatatcaatccctgcattgacagccattttgatagcttctttcttgctggcagccacatgctcgcgagtatacaggttattgatatcagcccagtcagtcaccagcataccatcccattgcaggtcttcctttagccacttggtgagcagttcatggttggcatgcacaggtactccgttgatagaaccgctattaaccatgatggtcaaagcgccggcttccacacaagccttaaagggcgcaaaacatttctcacgcagttcggattcagaaatataagccggcgtacggtcttttcctgtacgggccgaactgtatcccatataatgcttgacagaggccgcgatgcgattggctggaatatgattcggttcgtcaccctggtatcccaaaatagactggcttcccatgaccgcattgaccaagcagtcttcaccaaagttctcccaaatacgtgaccagcgcggatcacgagccatatctactgtaggagaaaaagtccaggggcaactacctgcccgggtttcataagccgtaatacgagccgcttcgtaagccaattcgggattaaacgaagctgctatattgatattctgtgggaaaaggataccatccaatgtataggtagtaccatgagtctgatctaatccgtaaatacagggaatacctatttctttcatagaaacttcctgaatccgaccgattatctcctgccatttagccgctgtttgtgccacaggaccgggagcattcagtacagaacctaccttaaactctgcaatggcctgttgtaatttcgattcatccaacacaaactcaccattaacaaaactacctaacacatcaatagaaagctgagtcatctgacctatcttttcatcaagtgtcatctttgaaagtacctgttctaccttctcttctacctgaacatccgaaacaatgactggtgccggggtctgctgatggcatgaagccatcagcagaatagaaaacaataccattgtctttctaaatttattcataacattttatgtttagagtttacttacataaccgcaatcatatctacaaaatagccgtgacctacacaaaggaatccaccttcattcagaatcatatccaataccggctgagtaagaacaagctcctttaccccattttcattaaaatcaaatgcggctgtgcccggcaaatcgttccaataagtggaaactgtacgcatctgatgatactcatccgaagcctgaatagaataatgaatatacagcgtagcccctgcttttatctcagcaaagacttccctgccaatcagattaaacgttttattagggttgtcatccggtaaatcccaagacacatagtgatgtcctttccataatactaccatagacgaaacaatgactgtgcactgttcttggctgcctttttcagaataaaacaagactggctctccatcaactgtcatgccgctcaacgtgtattcgccatcagtcagttgcggagcagtcagtacaagctgtacatcggactgctctataaattcagtcaccgtctgttcccccaaagtaagggatttgattttactcaaattgataccggataacgtccattcttttcctgcagtcatccggtcagctccagaaataaccaacgacttacggctcacattcactttgtcgcctccgaattcctgaccatccgcatccaataaaataatgcgatgctccccctcggtcacttcttgcggcacttgatattccaaatacataccctgatcatcactgccctgtaccaaacgggtcactgtctgattagcaatcacaatccctgttaccttttccaagtgatgtccatacagacgagctgtacatccaggagcgataatccgttcatgtcctatctgaatagcccaagggtcctcttccaaaggattgacctgcaccaaaccttcccgaaatgtcgatttaccctgttcggtagacacattcacccgcaaatgatacgtacctgctttcaagttcatgtcaatggtgacaccttgtgccacctcaacaccatccagtaaccaactcacgctacagtagtcggcaggagtcactgtcagagtcattgtgaaattagtatcccgattcatattcactactactggcagttgcccatctgtcttatctggaaacgtaggatctaaaatacgagggtcatcgtaagccgtaatcgtagaaaacggttcttcaccctgacaagctgtaaagcatatctgaactgccaacagcaataaccatgtgaaatatatctttttcattcgtctttctttttataaaaattctacatacttctataatttatttatcccaccataaccgggtgttccaactgtcagttccccccatacgctgaagcgcctcttcatagccaactttattatacgaagcctccaatacaggataacacaatcgcaccggaatttcagcaccacctgtcagaaactggccaaagccgtattctgccggagatttcagttttggatagccggaacgacgctgattagcccaacattctgccggattggtaaaatgaagaatccaagcctgggtatgaatactggccaatttttgttcatcggtgtagcctataccgttcttcgccatatacacattaaactccacttcgtcaactgccgcacaaccataacgctgtgtcaaaaaatcgatggcagctctgaccccttccgcatagaaggactcaacatcctgactcatgcttccaagattccaattcttcaaagcggcctcagccaataagaagcgagtctcggcaaaagtcatcactacacctggattatcccccttcaagaaattatttgccagttttggctccgtttcacgagctacactaacttcaatggccggattattttcagctaatgccttcagtacgtcgctgtcataaccagcaggccagggttcccaagaataggctccggggtcacgcggctggaaagcaatgcccttgctcagcatttcatcggtcaaatcaattcgattgtcaggacgggtagcactcatcaaaccatcataataacaacggctcaacataaacgtacgcggatcactggtagaataaagttggttgaacaaggtagagcacaggtaactgggattattggccgggtcattaccaaacaacaactgtgacagcgcattgccacggtaatcggaatacgcttcctggccaaagctgaaggctacatccatatatttgataagagcctcatcatcggcactctcaaaaatacctccctcggcagcaagcgccgcttcaaactcctgccgggctctttccggagccacattggaaatacgcatagcaaaacgcatacgcaacgagttggccagtttcttccatttctgaatatcccccccataaatcacatcacctgtaatggcatccttcgaagcactcaaagcctgttcggcttgactcagatcatcaaagaagctcaggtagatttcctcctgcgtatcatagcgggggttaaagatgccctccaaaaagcccttcccagcctcataacagggtacatcaccataaatatcagtaataatagacatcagatagacacgatagatagtcagtgccgcatgaatattcgtctttccttcgtccgttgccgtacgacattgggcatcagtcagattcttaatagccgcggtatagaaagtagtccaaacacggctcatctcactgttatcaagggtatgcctgccaccgtaattcgttgtgttccagcaccccatcagttgttgggtaaaaccatacaaatagttacgatagatttccaccatccccaaatcgccataagtctgcaactgagctgtagtaagctgtgcattcgggtcaatggtttccgccttcgacggatctgtattcatatcctccatatactgatcgctacaagaagtaaagccgaatatacaggccagcaaaacccagattaaataagatattttgtatttcattgtttctatgctttaggtattatcattcaagtttacttaaaatttcacattcacattgaaaccatagcttctacgtgaaggcaaagaaccatattccaatcccataccggtggtattattgtaattagagtccggatcgatattcggaacattcttccatacgataaacggattacgcgccacaaaggacagagtaattcctttgaccacttttttcagccaagtctcgggaagacgatagctcaaggtaatttcacggcatttcacgtaactgttgtcatagataaacatagccggtgcatttctacacacactcatccagtagtcttccggattgatgtagatatcattcggacgatacgtaccatcgccattatcaatcacaccaggagccacaaagccacctgtcggtttccaattggccgaacctttagggaatccggcagcctgacgctgttcttccgaacgataccattcatcgcgaccggccagggtctccttggccttacctgattcataagacgcacgggcagacatggaataaaggtcagctcctactttgatatcaaacaaagctgaaagagaaagattcttataggtaaatgtcgttaaaacacccccagtccaatcccaagaagcattacccaacacatgattgctcttatcatactgcggcaaacccgtactcggatcaatcagaatttcaccctgttcattccgtttgaagtcaggacctacaatagaaccgaaattttcacccaccttagcagccacctgaacatccagccagggagctttttccaattcaaacatatccatatcatcgaccagactcttcaccttgttgctgttcttagagaaattcacgttcaaatcccaagaaaaatccttcatttgcacaggacgcgtatttaaagctatttcaatacccttattttctatttcaccggcattaatcagacggtaattataccctgtagtccaagaactggccatacccataatctggttcttactgttttgcttgtaataagtcacatccagtccaatacggttattcaggaatttcgtttccagaccaatttcaaacgaattggttttagtaggtttcagattacggtttggtaaggtattgttattgatatatcctatggtaaaacctggataagtaaatttcgacttggtatagaccaatcccaattgataagggtccgtatcactacccacctgtgcccatgacatacgcaacttgccataaggcatccgactgcctaacttcaagaattcagagaacacaaaactacctgaaaacgaaggatagacatatacattattaccagtaggcaaggtagacgaccggtcaccacgcagggtagcatccaaataaagcatgtgtttccatcccacattcacagctccatataccgaattgatctgtttgcggtaactgctttcctcaaaactagtttcattaaagctcatcaaagctaccacatctctaatttgcatatcctgagcagtagttacccccgtttcattattgactttatacacatttccacccaaggtagcattgaaatcaaaatctccccagctgttattatataaagccaataattcaaagttgtacatccgattacagaatttgctgctctgcaaacggccagcttcatatccaggcgtagtaggagctttgaaatcatcaaagttaaaccagttcatttcagcacctaccgtaccttgtaccttcaaatgagaattaatgttccacacagcctttccattgaaacgaaactgatcttttttggaacggttgaagttcttgtaaatatcccaatacggattgacattatacgggtccatcccattccaattggcataattaccattcccatcttcatatgttttcagccaagcctgatcataggtagtagccaacgtcatcagattctttcctacattcgacttactgtcgcccaaagccggacgattcttcacggcttcccgagtataattggcactgaaatcaaaatctaccttccccatggaagtattggtacgcagattaaagatgtcacggctcatattagtttcaggcacaatgtccttgttgcgcatatctgtaaaggtgaaacgtaatcctgtatttccgctatgggcactaatgatagccgaattggtagcagtcagacccgtacgaaaaaaatgggacgtattgtcaggaatgatctgataaggacgggataccccatcaaaataagtcaccatattgcttccatcggctttggcaccccagcttttattcgtatttgaaacagcatcaatgctatatgttccattacttcccataccatagatttcctgtacatcgtcccacttagccaactgggtatcaaaggtcaacgttccattatactccacactgaacttatccttattggcttttttagtagtaatcaaaatcacaccatgactggcacggctaccatacaaagccgaagcagcaggacctttaagtaccgacatattctcaatatcatcgggattgatactagaaataccatctcccaaatcaaagcctccggcattaccggcacttccataattggtgttgtccaaaggcaccccatcaattacataaagcggctggttattgcccgtcatctccgtgctaccacgcaaaataacacgcgtagaacccgaagcgccaccggcagtctgactcaccactagtcccggtacccgtccagccatggagttaatcacattcgtttccttggctttagtcaaagcatcgccttttacctcatctactccataacccaatgccttacgttctctcttgatgcccaatgcagtaaccacgacttcgctcaacactttgctatcttcctgcaactcaattttcaacggagaattttccaccttcacctctaccgttttataaccaatatagctcactatcaatgtagcattgaaggctacattcaaactgaaatttccatccatatccgtaatggtaccattgctagtatttcctttttcaatcacagaagcaccgattaccggacctaagacatcactcactgtacctgtcacttttttgacttgctgttgaatcatttccgcacgttccactggaaatgcagcatgcactggcagaaaactgccgcataaagccagcgacaatgtgccaccacaaatggctaatttaaaattcgttgttttcattgttaatcatatttaagattaatagacttttatccaatccacatacatgtgcgccttctccccttcacgcaaagcagaaattttctctttatcagtaatattggggaatgccccacccactgccagattaaaaagcacataacattcatcttggaaaaactcatgccgtccgcttactttgctaatatcgaacgtataaaaaagaacctggtcaatccaaacagacagtttttgttcagtccattccaacgtatagagatgataagttccatcttgtaaactatgagccacattacctgcataatattcctgacgatgagtttccacactagatccgtaatgaatggcggtattcagataggtttcagaagtaccgttaattattccgttcttctctcccatttccatgatatctatttcaccgcattgcggccaaggtttttcattatctcccatcatccagaaagcaggccaaagcccattggccgtcttaggcaaacgaatacaggcttccaccttacgatgtttaaaactcatttttcctttagaatgaatgcgtcctgagtaaatctggccatttttatgctcggctgtcaatatcagcacggtcttatcaccatccttacctaccgttacatgttgttcatcataagcctgcaactcctggtttacccatccggggtctcgcacttccttcgtccacaccttttcattaaacgaatcaaaatcatctttaaagtaacatgtttcctctattccatccacccagtctgaatctttttcggaagcacaagcatgaggcaccaaaacaataaacatcaaaaacaaaagttttacatttttcataaaacagaaatatttaaagtttaacaactcctcgaatatccaaaaacaaacagtccgctatttaagcatagcaacatgaagcaacggactttcgaagaccgctgcaaaattgaataaaatcaccttatagggggttagaatgcagacataaaaggtttgatagctgacaaagtcagttctttagatacttgctgggctgtacaccaaagtgttttttaaacaaaatactaaaatacttgacatttgcaaatcctgtttccaccgaaacatcatttactcccttgccttctttcagtaactctgctgccttctgtaaacgaataatacggataaaatcctgaggacctcgacctgtcaatgactttaaacgactataaaagagtgtacggctcatagccatttctcgacaaagcacactaatattaaaatcaagatgactcatataattcatcaccacttgtgtggctttctctacaaactgacggtcgctttcagaaagagtcatattcgaaaactcttcttccggaaagttttccaaatccttttcttcacacggctgaacgagtacagtaccctgttccacttgtctcaacgcgtacttcatcaaccaacttctctgtcttctgcgattctccaacaaaccttgtactttcagctggagaatttccgttgtgaaaggtttggatatgtaatcatcagctcctttggacagacctgctaccatagcatcatgattagtcttagcagtcagcaaaataaaaggaatacctgccgtatccaagttctctttcactaactggcataattcatcaccttgaatacccggcatcataacatctgagagtatcaaatccggatattcttgtttcaaataatccaaagcagcttctccgtgagccgcttctatcacccgatattgtttttcaaagactttcttcagataatggcgcaaagcatcatggtcttctacaatcaataaggtttcaccagcattggactgttcttcctctgctgcctccatgggtttaacatctggcaaatgctgtccggagactttagcaaagtcctttcctgtcataccagattctacagctacaccatctgcccgtttgaaagccaacgtaaacgtagtgcccatattctctttcgaacggaaagagatctttccctgaagtaacttaacaagccgatgcacctgtaacaatccgaaaccgcttccttcttcctgtgattttctggcattttcggctctatatacagtagagaataacaacttctgttctttatgaggaataccaatacctgtatcctgaatatccacatacactttgtgcttggttccatacaaaatgatattaatttcacctccctgaggagtgtatttacaagcattagacaacaagttatcaaaaatcatctccagtaccttttgatctccccaaacattaaaatcttctgatggcaaatgaaggtttacctctaaccgcttactgacacagtaatgctgaaattcagcatattccttctccagcaattcgttcatgctaattggcaaaagttgcaacgaatagtttccttgctccatacgctcaaaatccatcaactgccctaccaaatcatgtagcctagacatattatgacgggccaaatccaaataataacgcgcattatcagtaagttcctccttgctcaaatcttccaacggagccattatcaaggtgaccggcgtacggatatcatgagctgtatccacaaaaaacctaatcttatcttcatcgtattgtttttgcaactgcccgcttttatagcgaagcgcaaaatagaacacaaaactagccaaacatagataggccaaccaagcataccaggaattccaccaaggacgggctatagagatatccaacatctcttcgacaatcacttccccactatttttacgtatactgcgcactttcagtttataatgtcctggtgatacctttatatatttcactttaccgtcagtcgaaggcaaactccaatctgtttcataaccatccaatatatactgataagctatatcactctgaaaacggtaattaatagattcaaaatagacggtaaaagaattataagcataatccagatgaactgacttcctttgtaactggtcatacaccaacggataggtttctctactttcttgttctccaagattatctataaccagtcctgtaaaacgcagcggtgcctgatagtcgacatgggctatcaagtgaggagatatacaaacagctccgctggtactcccataaagaaattgtccgtcagccaattgagtaaacgaagacttgttatattccctgtccacatcatgcaaataattcaaatcagaaacttgattgttttcaatcaaagccaatcctttgcctgtactgatccacacacgtccgaaaaaatctttctgaatactgaacacatcattagatggcataccatcttggatagtaaacgttttcactttcttagtctgcatattatacagactcaatccaccgccctcagtccccaaccagaccgtatcatcttcattgaagcacatgctaatgatgtaagcactcgtattgttattatgctgcagattctcgtacgaactggcataatgcacaatatgcccagtatctatagttattaaacaaaaaccgtctacagtagctacagccatctgatttttcccaaccaactgcaaagagtgaatccacttcacgccaaaagtctgaagtaccattccctgaggactcatctttaacaaatctccatccaaacctcctatccacacattctgctgtttatcaagcacaatagaaaaaatactattcgtagtaagcccccctctctgcttggtataatgagcccgtattcttcctgccttatctagcaagtacaccccatcgccataggtacctacccacacactcccattttgacctttacagagacaaaccaccactgttgaagtaagcacctgtttccacgaagaagaagctgtctgtaagatgctaactccccgatctgtagcaaaccataaatcaccacagggatgctctatcactccattcacattatcgttccccaatgattgagtatttctatattcatgcataaatacccctatcggatattttagcaatacagccaccgatactcctcccgtataacttccaatccaaatgttcccctgataatctttaataaccgcataaatgccatttcccttaaggctcatccggatatcatcatctatggtaaacaacggaaagacatttcctacagtcttacctacagcatatactcctcctccatctattcctatcaacaaattatcggaatcatactctgaaatggctcttatcggattcataagtgcgctataagatgtatacatcttcgacaaacaaccagtatgcaagtccatccgcaacaagccactgttaaaagtgcccatccacaactgtcttaataccctatcataatacaacgtctgcacatctgtaccttcagaaactttttttacgagagtagaagcccgtttattgtatacaatcatgccatcagaagttcctacatataagctatctgctatagataaaatatcattaacataggaatcctccaggactaaatgtatatctccggtctgttccattttaaacaggcctgtacttaatcccagccataacacaccatcgggagcaaaacaaagcttatttaaaataatctccccttgaataaaagagctcaagacaaacagcaagtcaaaagaatccttcttgacagaataacgatagatacggccagaatgatcgtacgcccacaatccataatcaacatcgtaacaaagctttaatcttctgccagccatatctccataatgaaagtcaccgggcaaagtataattcttaactgcatggccattataacggtcaatgcccgatttggtggcaatccacattacgtgatacttatcttctacgatagaaaacacccgctgattacttaatccatcaacacggcctatatgtcggacatcataggtagaatatgtttgtctgctaaacgccgagacatgcagcaaacacaacaaacataatatgatacaagataaaggtgttttcatattttaacgtgagttcgaaacagacatagatacaattcactgataaatagaagcatatcaataaaattattaaatttacagtgcgaattataacatttaacaattaccactatgttctcagagtataaagttacagagatttattgtacgacggatgattttttcgtagaatttgctttgtagcagaaaaaataggagagtccgggtcagtttgaaaacttgaggaaattagttaaaatagctatctttgatacatgaaacagaaacgccaagccccttactcctatggcatacctcaagagtattcacatttgcacctaccccccaaagacttcttctcggaaatagaagtgcaagactttcccattcgtggcaaagctgtctatctacgcgtcaagtaccgtcattgagaagacccggaaaccggacagacttatggccgtgattggaacttagtgacctccggtaaaaataaccccaaaacaagaaagcccctgcatcttccgatacaggggcttctctctctaaaaaaacggcgactacctactctcccactgttacgcagtaccatcggcgtgactgagcttaacttctctgttcggaatgggaagaggtggaacctcagtgctatagtcacctgaataaggcagacatgatgtaaaaagtaaagaacaaccggtaatgaaaccggtaaactgaacgtatataccacccatacatggcaagaccaaaagtgaacgggcaattagtaatgctcggctatgacatcgctgcctgtacacctgcatcctatcaacgtcatcgtctatgacgaccctaagaaatctaatcttgtggctggcttcgtacttagatgctttcagcacttatccaatcccgacttagatacccggcaatgcacctggcggcacaaccggtaaaccagaggtcagtccaacacggtcctctcgtactagtgtcagagccacgcaaatttcatacgcccacgatagatagagaccgaactgtctcacgacgttctgaacccagctcgcgtgccactttaatgggcgaacagcccaacccttgggaccttctccagccccaggatgtgacgagccgacatcgaggtgccaaacccctccgtcgatatgagctcttgggagggatcagcctgttatccccggagtaccttttatcctttgagcgatgtcctttccatacagaaacaccggatcactatgctctagtttcctacctgatcgacttgttagtctcccagtcaagcgcccttatgccattacactctgccgacggttaccaatcgtcgtgagggcacctttagaagcctccgttacgcttttggaggcgaccaccccagtcaaactacccaccaaacagtgtccccgcagccgcgggttagaactcaaataatcaaagggccgtatttcaacagcggctccacaaatactggcgtacctgcttcgaagcctccggcctatcctacacatcaattacccaaattcaatgttaagctatagtaaaggttcacggggtcttttcgtcccatcgcgggtaatcggcatcttcaccgatactacaatttcactgagctcacggttgagacagcgtccagatcattacaccattcgtgcaggtcggaacttacccgacaaggaatttcgctaccttaggaccgttatagttacggccgccgtttactggggcttcaattcaatgcttctcttgcgatgacatctcctcttaaccttccagcaccgggcaggtgtcaggctgtatacttcatatttctattttgcacagccctgtgtttttgttaaacagttgcctggaccgattctctgcgcctcaagtcaccctgaggaccctttatcccgaagttacagggtcagtttgcctagttccttaaccgtgaatcactcaagcgccttagtatattcaacccgactacgtgtgtccgtttgcggtacgggtaccacaaggattaagtttagcggattttctcgggagtatgcttacgtgcactattggattgtcccgaaggacgctccatactatcaggttcgactcttcctgcggatttgcctgcaggaatcaacatctacaccctttaacggactattccgtcagtccacggcactgtcactgctccgtctccacgtcactccttgaggtagtaccggaatattaaccggttctgccatcggcctcgccgttcggctgagccttaggacccgactaaccctgatccgattagcgttgatcaggaaaccttagtctttcggcgagggggtttctcaccccctttatcgttacttatacctacatttgcttttccacacgctccagcaaggctcacgcctcaccttcaacgctgagtggaatgctcccctaccgatgtttacacatcccaaagcttcggtagaatacttaatgcccgattattatccacgccaaactcctcgactagtgagctgttacgcactctttaaatgaatggctgcttccaagccaacatcctagctgtcttagcaatctgacttcgttagttcaacttagtattcattttgggaccttagctgttggtccggattgttctcctttaggacatggaccttagcacccatgccctcactcctgacatagaactgacacgcattcggagtttgtcaagacttgataggcggtgaagccctcgcatcttatcagtcgctctacctcatgccagtataagtcaaggctgcacctaaatgcatttcggggagtacgagctatctccaagtttgattagcctttcacccccaccctcaggtcatccagaagcttttcaacgcttattggttcggtcctccagatggtgttacccatccttcaacctgcccaagggtagatcacttggtttcgcgtctactccttccgactgaacgccctgttaagactcgctttcgcttcggctgcaggtctcaagacccttaaccttgccggaaaaagtaactcgtaggttcattatgcaaaaggcacgccgtcactcgtaagagctccgaccgcttgtaggcgcatggtttcaggaactatttcactcttctgttcgaagtgcttttcacctttccttcacagtactggttcactatcggtctctcgggagtatttagccttaccggatggtcccggctggttcacgcagaattcctcgtgctccgcgctactcaggataccactaggcttcgactggcttcgtatacgcaactatcatgctctatggttgaactttccagaacattctactcaccagttttcttgccacaacgtggtcctacaaccccacatatgccgtaacataggtggtttgggctggtccccgttcgctcgccactactaggggaatcattatttattttcttttcctgcaggtactaagatgtttcagttccctgcgttagcctccaacttggttggatgattggccttcaaccaatcgggttgtcccattcggaaatctccggatcaaaggttatttgcacctacccgaagcttatcgcagcttatcacgtccttcatcgcctccgagagccaaggcatccgccatgcgcccttgcttacttttagtcttaccgacaacgtatggtcgatatatactttcagctttaactttacttttttctgttacatcatgtcaaagatcgtttgagaatattccgatttaacggaatctcaagagtggagaataacggattcgaaccgttgaccccctgcgtgcaaagcaggtgctctagccagctgagctaatcccccgagatagtggttagtaatagacggtcagtgattggtaattagtaattagaattagtaattaaaatcgtccgtgtctctcaccaagactatgtcgtagtcccaggcagagttgaactgccgacctctacattatcagtgtagcgctctaaccaactgagctataggactgtcagtcaaaccctagcccgaaggctcggcttctactttctctttatattattaataaacaatcttcgcagtacaagaggttcttatggaggtaatctctttagaaccaacttttcgtctttttctgagcgtcgctccagaaaggaggtgttccagccgcaccttccggtacggctaccttgttacgacttagccccaatcaccagttttaccctaggacgctcctcgcggttacgtacttcaggtacccccggctttcatggcttgacgggcggtgtgtacaaggcccgggaacgtattcaccgcgccgtggctgatgcgcgattactagcgaatccagcttcatggagtcgggttgcagactccaatccgaactgagagaggcttttgggattagcaccacgtcgccgtgtagctgccttctgtaccccccattgtaacacgtgtgtagccccggacgtaagggccgtgctgatttgacgtcatccccaccttcctcacatcttacgacggcagtccgggtagagtccccagcataacctgatggtaactacccgtaagggttgcgctcgttatggcacttaagccgacacctcacggcacgagctgacgacaaccatgcagcaccttcacaactgtccgaagaaagaaccgtttccgattcagtcagttgcaatttaagcccgggtaaggttcctcgcgtatcatcgaattaaaccacatgttcctccgcttgtgcgggcccccgtcaattcctttgagtttcaccgttgccggcgtactccccaggtggaatacttaatgctttcgcttggccgctgactgtatatcgccaacagcgagtattcatcgtttactgtgtggactaccagggtatctaatcctgtttgatacccacactttcgagcatcagcgtcagttacaatccagtaagctgccttcgcaatcggagttcttcgtgatatctaagcatttcaccgctacaccacgaattccgcctacctctgttgcactcaaggtcgccagtatcaactgcaattttacggttgagccgcaaactttcacaactgacttaacaacccgcctacgctccctttaaacccaataaatccggataacgctcggatcctccgtattaccgcggctgctggcacggagttagccgatccttattcatacggtacatacaaaaagccacacgtggctcactttattcccgtataaaagaagtttacaacccatagggcagtcatccttcacgctacttggctggttcagactctcgtccattgaccaatattcctcactgctgcctcccgtaggagtttggaccgtgtctcagttccaatgtgggggaccttcctctcagaacccctatccatcgttggtttggtgggccgttaccccgccaactgcctaatggaacgcatccccatcgacaaccgaaattctttaataattatcccatgcgggaaaactatgccatccggtattaatctttctttcgaaaggctatcccagtgttgtcggcaggttggatacgtgttactcacccgtgcgccggtcgccatccatcaaagcaagctttgatgatgctgcccctcgacttgcatgtgttaagcctgtagctagcgttcatcctgagccaggatcaaactcttcattgtaaaagtattgttaatcattccataaaggaacggttgttgctctgttcaggacgctcgaatttaaaaagtatctattacctatttaataagtaatgacggttctttttattttacccaagaccgtttctttttcagaaacaagtcttgctcttgtactacttgtattgtttatgtaaatctcttcaaagatcgcttcttttatgtcggctttcttttcaggaaagcggatgcaaaggtaaaaacttttaagtatatcttccaaatattttcggaagttttttttcatctttcctttttcccgtcatctctcttgcgaaagggagaacaaaagaaagattgttttaccgacccggattcaagaaaaagtgtgtcaaccaacgctgcttactttttgaaagcgggtgcaaaggtaagaactttatttcatatcttccaaatgttttcggaagttttttttcattctgctttttcaaaggaggaatttcagaaagaaacaagccccaagcagaagaaatatgtaagagttcctacgccgttcctgtcagaatgtcaaaacatcgctgcttccgttctcgaaagcgggtgcaaaagtaggactttatagcatacaagccaaatatataaggggattttttcgagtttctcttgaacatttttataaaacgctgattgacaaatgtgttgaagaacatattttttaaggaggatggaaagcctggcaaaagggacacattataatatatgcgcatgcgcgcgaaaaggaaacagcggaagggggaaagaaaacacggagatacggaagggcattgcatgacacccgggtcttgacatgttcgacatccgggtctcggcatgttcgacatccgggtctcggtatgcacgacacccgggtgtcggacacaagataaaggctaacgggagaaatgacacaggaaggaaacaatacagaaacatgcaacgaaaagaaagacagaaagaaagacggcagagaaaaagatacaaaaaaacaacgacacagtaaaagaacagaagacacagaaaaaaggagaaaggcggctgacagcccggaaaacatgaagcaagccacaacccaacaaacctgttaaaggaagacgcacgttgtattaaatgttaacagaagcaactgtctcataaaccgtgttaccaaacaatagatttccagaaaaaatattggataataccaggaatagaataactttgcaatgtgtttttcatagtattagatttaaggttaacaaaaagattggctgtctgggagagatagcctttttttatggaatatgataaagaaatatgcagcgctcctctgtacataattttttttcgtatatttgcgagaaacttattaaaaaccaatcaaatctatgcttacgaaacttaaccacgtactccttgcaggtgttgtagctttggcatgttcttcgtgccaaacagaaaaaaaggccgattaccaaataatacctctcccccaagaggttgttctgacacaagaaaagccgtttctattaaacaaaaatgtttccattacctatccagaaggcaacctcctgctaaagcgcaacgctgaattcttatccggatacatccggcaagccatagggtatactcctcctgtaaaaggcttgaaggacggagaagcggcaaagcatgcaatcaatttaggtttagatgcggatatagccaataaagaaggttatgtgctgacgacaacttcggaaggtattcaaatcaacgggcagacagagaacggtgtgttctacggttgccagacattacggaaatcaatccccgccgaggctcagggagctgatattctgctaccggcaggcagtatcaaagacgaaccccgctttacatatcgcggtatgcatcttgatgtatgccgacatttctttccgctggagttcataaaagaatatatcgacttactggcgctacacaatatgaatactttccattggcatctgacagatgaccagggatggcgcatcgaaataaagaaatatccgaagctgacggaagtcggttcaaaacgcaactgcaccgttgtcggcaaggcaagaagcggaaaatatgacaacattccgtatggcggcttctacacgcaggaacaagccaaagagatcgtgaagtatgcacaagaacgttacatcaccgtaattcccgaagtagacctgccgggacacatgcttgccgctttggccgcctatcctgatatgggatgcaccggaggaccgtacaaagtatctcccgactggggtatctttgaagatgtattgtgcatcggcaacgaacagagcatgcagtttcttgaagatgtaatggcagaaatcaccgagatattcccttctaagcttgtacacatcggtggagacgaagctccccgtacccgctgggccaagtgccccaaatgtcaggcacgcatcaaagcggaaggcttgaaaacagacaaacaacatacagccgaggaccgtctgcaaagctattgcatgacacgcatcgaaaagttcctcaacagcaaaggaaggcagattatcggttgggacgaaatactggaaggcgacgtggcaccaaatgccaccgttatgtcctggcgtggcacatccggcggcatcaaggctgcacaaatgggacatgacgtaattatgacacccaatctttactgttattttgactatctccaaactgcggacagtaaagacgaacctctcggcataggcggatacgtaccggtagagaaagtatacagtctcgaccctaccgctgcgcttaccgaagaacaggccaaacatattctcggtgcacaagccaacttatggacagagtatatcgccactaccgaacatgcagagtatatgatactcccacgcatggctgcccttgccgaagtgcaatggacacagcctgaaaagaaagattacgcggactttacccaacgcctgccgcgcctcatcaagttctaccaacgggatagcatgaattatgccaaacacatattcgatatccaagcggaatataccactatccaagaagaagaggacggaagcggtagcggagctatagtagccacgcttcgcaccattgacaatgctcccatttactataccttagacggtactgaacccactacagcctccgaacagtataacggaaccggcatcgttatccgccagtccgccgacttgcgtgctgttgctatccgccctgaaggaaaaagcaaggtaacagaaaaaagcttctacatcaacaaagccactttctgcccgattgagctgacaggtacacagcccactccgaaatacgcctttaaaggcgctaccgctttagtagacggaatgagcggaattgacaattatgcaaccggcgagtggattggctttttggatggagacgtaacggctgttatcgacctcggtgcgtcaaacggtaatgccgcaggcaagacagttgccgaattaccggagataaagcatgtctctacccatgccgtaatagacatgggcgcctgggttgcaggatgtacaggcctgacagtatcagtgtctgacgataacaaaagcttccgtgaggtggcagccaaagagtttcccgttgaaatggacagccgtaaaaaagctgtggcaaactatgaagttactttcgaaccggtgaaagcacgctatgttaaagtattaatcaagcgtacccccgccctgcccaaaggacatccgggagaaggaggaacacctttcctgtttatcgatgagattgaagtggaataaggcaacttatcaaaaacggtaacatatacaacaactatcatcctgtcattcggaggaatctaatatccaagaacgacaggatgatattttttgcggaagtgtatctaaaacatttattcaatcacgaaactcccacgttgcaaatcccgatcctgcgagcttttccccaccatcacatcgtacctgcctgcacaaacccgcatcgtattactttgagcatcccaccattccaattccttgccgttcaaatcgaacgctacctcaacactctttccggcaggaatgtggacacgtttaaaagcacgcaaagtcttgcccggtccttctgcgtcatcttgcttcttgaggtaaacctgcactacctcttcaccgtcacgctgaccgttattcgtaacgttaacggtcaacttcaaaggctctcccaccttaatctgttccttggtcaaggataagttgccatattcaaaggtagtgtagctcaagccgtaaccaaacgggaacaatggttgttgagtcatataacgataggtacgtcctgtcatattatagtcctcaaagtcgggaagctgagacatattgcgataaaaagttacaggcaagcgtccacccggattatagtcaccgaacaatacatctgccacggcagtgccgcccgcctgtcccggataccaagcctgtaggatagcttcacaattctttgtttcaggctccaaagcgatgggcgaaccggaacaattcaccaaaattatcttctttccggcacgatgcaatgcgtgaatcaattcacgctgaacagccggcaattcaatgtccgtacggtctccgcccctgaaaccgggaaggttcactcccatctcctctccttccaaaagaggagatataccaccggcaaaaactacaacatcggcctctttcacacaagctacagatgcatcaatatttaccttttgcttgaagccgatatcgaaattcagttgcgcatcgcttctgaaatattcaaagtcaagctcgatgtcgtaaggaacacccgcttttacctgtagcgtatagtccagtgacctgccaccatgcgtattgcggaaacgctttacttcttcgccattgatacgcaggcaaccggaaccgtatgtataaatttcgaataccacttcgcccgattgtagaggggtgagcacgctgttgtaagttgcagagaagtctgtcaggtttacgcccggtgcaaaaactgtagctcccgaggtacagaagcggaaaggggtggttacttgtgtagtagtcaccggggtgccctcatgctttacattgttccaataacgtgccgtaaacccctgtccgtctgccgacttacactggttgaacacactttgaatcagtgttctttccacccaactgcaaccctgttcataaatcagcttatcgtccgctcccaacgcgttccgtattccatccagaatggtgactgtatgtgacggcataccgttataattgccccattgcattacggagtcattagcattaggtcccatgacagctacagttagaccgccacgtttcaagggaaggatattgtccttgttttgcagtaatgtcatggacttgcgggccatatccaacgccaatgagtcgtgtgcagccgaagctactacggagaaaggaatcttcgtccaagacacatcttccggagcgtccatttctcccaaagcaaaacgggcttccagcaggcggaacacagccctgtctatgtctttctcatcaatcttgccttcttgagctgcctttaccaatgccttataactggagccacactccagatccgttccgttcaacactgcggctgccgaagcagactctgcatcggaatatgccttatgcccgtattcattataaaaatcggcaatagcaccacaatcggaaaggacaataccatcgaacccccaatcgttacggagaatttgcatcagcaaacggttgctgccgcaacaaggctctccctcgaaactgttataggcacacatcacctcctttacaccggcttccttcactaacgcctcaaaaggcggcagataggtttcatacaaatcacgtgtgctaaggttctccacgttgaaagaatgacggttccattccggaccggaatgtacggcaaagtgtttggcacaagcatgcaacttatcgtatcttccgtcattggttccttgcagacctttcactaccatgacacccatgcgactggtgagataagggtcttcaccgtaggtctcaataccccgtccccaacgcggatcacggtaaatattcaccgtaggcgtccacatggtaagtccctgataacgctcgtaactgccctgcgatgcgtaatatgcattttttgcacgcgcctcatcagatacggcattgaatacttcatatactgtttgcggcgagaaagaggctgccatacctatcggttgcggaaaaaccgtagccaatcctgcgcgtgccacaccgtgcagcgcctcgttccaccagttatagggtttgatacccaagcgctccaccggttgggaagtgtccatcatcaatgctactttttcttccaaagtaagttctttcaataaaagttccgcccgcttatccggagtcaaagaggttgttctgtacgtaggttggctgcaccctatcagcaatagaagaggcaaccaacagataagtttccgtttcatggttgttgctgttttaatgatagtaatcagatttatttaccgtacaaagatacagggttacccgatataccattgtgccaaatgtttcataaagtttactgtatgtatcatgacatatactatttacacatattaatccggtaggaaagaataataccggcagcatgctaataatgaaagggatacgtgtaccaagatatttcacgccgtggtacacgccgtaccacagtgtggtacaagcagtaccttactaaggtacgagacctaccaccctttggtacatgagctaccaaagagcggtacagggaataccagcagccggtaccggcagtaccacccttagaactggaagtaaatgaacggttgtatctccgaactcttcatctgaataaccagatagactatggcaaccagcagcaatgccttccctatcaacggaaggcgaacgaccgccttgctgcaagcgtgctcccaactgtcaggcacgaaatgcaggaaaaagccgagcgccatcaaggcaaacacttcccaatagcccactatcagttgcgggaaaagcccgggacggaaagtcgtgaatatctgcctcaacatatccagcgaagcggagaaatcggcattgcggaagaatatccagcagaagcagacgaagtggaacgtaataacgataccgaagaagcggcggatgccacgactgcgttcgcccttcttccgtccggtaacgcccatccagaacttatggacagccaaagcaacgccatgcaacatgccccaaaacacaaaattccaggaagccccatgccacaagccgcccaggaacatggtaatgataaggttggcatactggcgtatcttgcccttacggttgccgcccagggatatatagagataatcgcgcagccaactggaaagcgagatatgccaacgacgccagaactccgtaatggatgccgacttataaggcgagtcgaagtttatgttgaagtggaagcctaataacaaggcaatgccgatagccatatcgctatatccggagaagtcgcaatagatttgcagtgcatagccgtaaacacccataaggttttccacacccgaatacaaggtaggattatcgaagatgcgctccacaaagttgatactgatatagtccgagataaccgccttcttgaacagtccgctcacaataaggaaaatccccctgccgaacatctctctggaaacaaacaacggacggcggatttgcggaataaagtcgcgtgcacgcacaatgggacccgccaccaactgcgggaagaatgatacatagaatgcgtagtccaacaagttggtgagaggcgttatctccttgcggtacacatcgattgtatagctcagcgactgaaacgtaaagaaagatatacccacaggcaggaagatgtccattgcggtaaacgtgccgcccgtgagcgaagcaaagaaatcgcagagaaagttcgtatatttaaaatagcacagcagtcccaggtttatcgccagactggctgcaacccacattttgcgttgccaatgcacggtggcacgcgccataaggcgggctatgaagaaatcgctcaccgtaacgatagccagcagaaagaaataagcaccgctgcttttataatagaaatagtaagaaaacagggtgacgaacatcaggcgggcggtggtgcggcgctgcaaaagcaggtagaacaggataaaggctgcaaacagccacaggaaaatgccgctgctgaatatcatcggtgcatgcggattgtacaccagcaggtcgtgcaggcgggtagggtctatattcagtttgttcaaaagttcgctaatattccacatcggtcggtttacggctaaatgagttaactacattcactgactgcaatagtcattatacgctttcagcagagcgcgatagaacatctcgccctgcaatgcatatccttccggaagatagtgcacatggtcgggacgcatcagacgcgcttcctgccagttgagacaagcccggcggacaccgccgaaagtctcgtacatatcccacaccgccagtccgttggcatcggcaaaacggcggatggtctgtgcggcaacagcagtacggggattaatcttataggtacgccggcgacggcgctgacggaaactatcgtatgaaccgggcggagtagtcatcagcatcggaacatcgggcagactcttgcgaagcatgcacaccagttcttccatctgccggtagtgcagtatggagttataacgccggttgtggctctcgttcgttccgaaagagagaatgacaaggtcgggatgcaacgcagcgatatccgccacacggtccggacgggtaaaggttgtacaaaacgcaccgtttatccccatgtccgtataagacagtgctccgaatgttctttgaagcaacccgcccgtggtttcgggaaagatatggccacggatatgactgtcgcccacatgcacgatacgtaccgtatcgacagcgatgcccaggcggagcatgcgcagtttctcccaaaagggtttcaggatgccgatgctgtctatcagctcgttcccgcccagttgccgaaaggctgcgggcagggtgatgagaggaatgggcaacgtatccgtacgctgtccgtagattctaagcgtgtcgcaatcaaatgccgttttctgaagccggggacaacccggaagcacatcttgggcatagttccgttgcaccggcaggaagagcaacgccaataccgcgcagcgaacggcaaaccgtaaatcggccaagtaccggctccttttatggctccgcttcataggcacgcctcctgtcgtattgttctttgccataaaccagagcctcataaagcagttccgccagatgcttgccgccacggaagttgatatgcgtataatcgtaattggctaaagaaggtttggcatgcaccatatccgccatactgccttcaccgcccatggcttcgaacatattccagaaagccaccccgctgtcggccgccagattctgctggtaacggataaggtttttaatgccgggcatggtccgcaggctgccctcttcggttttatactcgcggtcgcccacaccgacaatgagaattccggcttgggggaaggcttgcttcaaatgggcaatggtcgtcagcataccgtcgcgatagcggtcgtaattacgcccgcgttccgtagctacgttcagtccgtactgaaggactatcaaatcgtacggacgcagttcgttaaattcgcgcatagtccggacaggtatggaacgcaaagacagaccagaactgccccgaagcgaaaaattatcgacggcaatcccttgcgtgccgtccatagccactccgtagaataaggtagaatcggcgctctccactttccaacgcacagagccgatacgtcccgttacatccatttcacgaagtccgtcggcaggcgggaatgtcccggtctgcggttcgcccttgtttacggatgccgaaaggcgggcttcgcctttattataaaagaagatagaagcacgttcgcaagtatcgagccgggaagcatacttcctctgtccgccaagttctacgtacgctccgggagtcggaataaaataatggcccgaaacaccttgtttgccacggtcgaagaatacggagtccgtaacggaatggctctgccagccgccaaagctgtgccgcaccgtaggccgatagccgttgaccggagaagtaatcgtcacgaagcctaccccgcagccgccataacgttcctgcaacatcgcacgcaggtcggccgtcaggatatccgcctcgatgaaagaatctccgaaataggcaatacgcaccggacggggctttaccgccagctcatccagcgcgcgatagaaaggtgtcatgccgcgcagggtggaatcgctgtaatcctcaatgcaggtcatgccgctgcgacaggtatccacaaaggcgggcttcactttcgggggcggcggcaacagactgtccggttcgctcacgacttccggcacgggacgcacatcgccaagtatgtctacccgcctcaacacatggccccctatcgtgccccccggcagcaagttcagcagcagaagtaccgccagcacaataagcatcagccaacctgtatgttttaaaacgctcttttccataactaatccggacgcaaagataaagaatcggatgaaaataaatatcgtccttcctaaaaagaaatcgtcaggttcattttgatacagtcttgactgctgtttgtatggcagaaactttaaacagtccgctctatgttccagacaaatgcccggagccccaattgctcggtctgcttgtccatgttgtgaaggacctccagcaggggctctacccgctcgtcctctaccattgtaagaatggcggagcacatggaaggccaggcgtgactgccgtaatgaggctcaccggtcttggaaccgcgcccgcgaacctgctcccaataagtgaagccccggcaattgagccggtcgagtgtagcaatgatacgctcgtaatatgcctgatcgaatgtgattaatactgatttcattattcaattattaaatgtcaactattaattattagcctgttcctcaaagtaagcatccaattgcttgcgcatcttgcgacgctgacgtttgatgccgacaccaccgaagatacaatacatcgtaggaacgtaaatcaaagtcagaatggtggaaaccgccagaccgccgattacggcaatcgccataggactccacatctcagaaccctgaccgctgctgatggccatcggaatcataccgagaatggtagtcatggtcgtcatcaacaccggacggagacggctcttgcctgccgtaaccacggcattcagcaccgactgcccgcgttcgcgacagagaatggtgtagtcaatgagtacgataccgttcttcaccacgataccgatcagcatgatactgcccagcagactcatcacactcagcgtcgtattggttatgaacagcgccatcagcacaccactcatggcaaacggcacggagagaatcagaataaacggataggtaagcgactcgaactgggctgccattacgataaacacgaggatgataatcaatacgccgagtgttcccaaatcgcggaacgaatcctgctggtcttcaaaggaacccgccacctgaatggttatgtcggacggtttctccattctatcgataatggcattacccgcagccaccacatcacccaacggagcgccggagatgacggcagacaccgttacgatacgttcacgatccttacgctcgatagtaggcggagcaaaacgttccaccacctttcccaaatccttgatacggacgccctcgcctttggcattgtataccaatatgttctcgatactttcaagactggtacggtattcgggggcgtagcgcaccttgatatcatactcatcgccgtcttcacgatacttggaagccgtagcgccattgatgcggttgcgcagataggtggcggcagtagaaaggttcagtccgtgaagcgccagcttctcgcggtcgaagtccacctggtattcgggctggtaatcgctgcggctgatgttgacttcggacacgccttttacgttcagcagttcgcgcttcaggcgggcggcaacgctgtcggtttcttccatactgtagccatatacctcgaaatcggcggatgcctgggccgacatacccgtattactaccgccgaaaataacctgtgccttactgaattcgggataagccttcaggtcttcgcgcatttcctcgcagactgtctccagcgtaacatcacggtctgccggatctaccaaactgatattgaaggaaatgatatgcgaaccgttgtcctgcatggaagcccaggtattatccgaatcggcctgccctacggtatagttgcatatcttcatgacacccttatacttctgcagccactgattggtaagtttctgcgaaacctcctgcgccacttctttacgcgtaccgataggcaactccaactgtacggcaatacgggcattgtcctgcgccgggaagaactccgtaccaatggtctttgcacagaacaggctcaggataaagaatatcacacaaccgacaagcacgaccatacgatgacgcaccgcccagttgagcatacgtgcataccagttgtccaagccgtccaatgtgtgctctatcggcccgaagaatattcggaacatcttggactgtttacgctgcaagcggagcagttgcgaacagagcatcggcgtcagcgtcaaagccgaaacggtggatacaaacataatggcgcacatcatccagcccaactgcttgaacagcacgccggacataccggttaccatggtcagcgggaagaatacggcaatcatcgtcagcgtagaagccactacggaaatagccacctcgttcgttccgtgaactgctgcctgcttcgggtcggaaccgcgctcgatgtgtgtcgtgacattctccaacaccacaatggcgtcgtccaccaccataccgatggctatggagagtgacgaaagcgaaatgatattaatcgtattccccgatattgccaggtatatgaacgaagcaatcagagaaagcggaatcgtaatacagataatcaatgtagcccgccagcgtcccaggaacaggaataccacaatcacgacgaacagcagggcgtacatcaccgtctccgtcaaactgtcgatagtgttcaggatgttttcggacgtatccacaatgacgcccaacttcacatcgctcggcaggttcttctgcagacggggcaacgcctcctgtactttcctggaaatctccaccgaattggcgcccgactgtttctgaaccacaatcatcgcaccctgcacaccgttgttataggtttcctgcgcacgttcctccacggtatccacaatccgggctacgtcgcgcaggtaaacggtagcaccgttataggtgcccaccaccacatccgccagttcacgggagtcgtcaaactcaccctccacacgcaaggaataagtctcattgccgatgtcgaaattaccgcccggtatgttcttgttctccgcaccgataatggaactgattgtttcgatactcaagttgtacgcctccagcttataggggtcgcagtacacctggatttcacgctgcggcgcaccgctgatagacaccgtacccacaccgggaatacgcgccagagggtttaccacacggtcgtccagtatcttgtaaagcgccgactggctttcatttgcctgtacggacaacagcacgataggaatcatatccgtactgaacttgaagatgataggattctccacatcatcgggcagttcggaactaaccatatccaacttgtcgcgcacatcgtttgtcagtacgtcaatatcattaccgaactcaaactccagcgtaatcagcgacatattctccgaagaacgggaagtgatgtgcttcaaatcgctgactgagttcaaaacattctccaacggacgggtcacgttgttctcgatatccgaagcacttgctcccggataggctgtcatcaccataatcgtattcgtatcaatgtccggatacaaatcaataggcaacttggacaacgagaacagaccaaatatcaccactgccaggaagcagagcgaagtcataatcggtttcttaaccgcaccttcatataaactcatattattagggattagggattagcgtttaatgattagggattagtgattaacgtttagtgtttagtgtttagagattagcaacttatttaccggcaaaccactaatcactaatcactaatcgctaaccgctatttctacttccattccgttcaccagtttggtttgtccggctataaccacccgggagttgtcgggcacaccggaaatcagctcgtattcggcccccatgcgacgtccgagctctaccttattataggtaaccttgccgtccttgtacacatatacataacggtcgccggaaccggattgcttcacgatggccaaatcgggtacaaccacattgtttttggttccgaagttaagcgtggcgcgggcaaacattccgggacgtaccctccggtctttattggcgagtttaatctctaccggaaaagtacgggtgttcgggtctactgtaggatacaccagactgatatagccttcaaagggttcgtctccgtaaacatccagcttcacggctaccggagcgcctttcttcacttgggtgaagtaagtttcggaaacattgataagcagtttcaccggcataatctgctccaccaccagcacgggttcgccgccgctgtacatatcgccgctgtcatagtttcgggcagttacaaccccgtttatcgggctgagcaacgcggtattctccagcagattgcggtaggccgtttcttttatgtccagcgccatcttggctgcatcccactccgatttggatgcaccgcccactttatacagttcgtccatacgcttgaactcaatctcctgattgtccaactggaactttgtctgtttcaggttcgcctcatccatgctgaccagcttctgacctttggacacgcggtcgcccacttccaccaatatcctgtcgatgcgtaccggagaggaaggagctatgttgttctttacctctgcttctacggtagctgtgtactcatgaatctgttctaccggacgtgcttttacatccgccagcttcactctcggcttttcgtccacctgctcaacggcaactttgtcttttccaccgctgcaagcgcccaacagtgctactgcaagcagggcaatcaattgaaaacgtttcttcatatcgttgttcttgttttatttctgattactgatgatatagtctcttcccaatacctggtcaaggtcggccttagctaccaggtagtcatatatggattggttgtaagtaagctccgcctcggtgagctgaacctgcgaagtattcagttcgagtaccgtacccttgcccacttcataacgcttgccggcaatctgcaccgccttttcggcctgcatcacattctccttgttactggatacctgctccgagctggctgccatattatcctgatagcttgtaatctgcatgttcagcttacgttccgtatcgatacggttctggtccaactggcgcatctggatgcggttggatttcagtttcgtaaagttgcttgccttatataaaggaatactcagattgaataccagcgaagagctgccgctgtaatggtaatcgaagatgttccaactgtcgttgttcatggactggtactgataagaataccccaatcctatcgtcggcatgaagttggtgcgcaaggacttgatattcttctgaagcatcagacggtttaactccaattgcttcatggtagtattgttcaccaaaccttcgtgagcgtcattctccaactgattggcaaacacgatgctttcataggccgccaaactgtcgtcaatcttaatctccacatcggcggtaacgcccatcagaaccttaagttgcagtttggaaagcgtaacggcatttccggcggaaataacactcggcttcacgctacgcatctgcacctcggcggtgattttatcgaattcgcttaccgctccctgctgatatttggcattgacaatattatagttctcttccgccagttcatagcttttctgcaaaacttcgtatgagtcctgcgacagcatcagctgatagtaggctttggtcacctggttcactaaatccagtttggaagcccgcgacttctccactgccaactctatatccgtctttgtcatcgacatggcgcgatagacggaaggagcaaacaatggtaaactgatattcaatgttcccgcagcggtattcgccttgtcctgccccattttcacgatttggtcgccgatactgaactgcggagccgtgatggtatggctcatacttcccgtaatacttgcctcgggcaacaagttctgccaagtttccttacgactcactttcttgagggcaatctcctcttccgccactttaatggtgggattgtcgctcaaagcaatctccaaggctttgtcaaggttcaagatcagggtatccctcgtcccttgcgcccgtgcatggctgcctgccaagactatggcaataagcaacagccattttttaccctcaaaaaatctctgcatcttcataaactattaattgttattctatttggtttccgtgtcattgtctgcaggcacaacctttttacggtattcccggataaacgcttccagctcgtgcgccccctgttccgtagagattccgcgcagaaaagtgaacattatagactcatagacttcaaggaaggaatactctttgcagatgtccgtattcatcaacacgtctatctgctcccttaccaacagattgataatggcaaagtttacatcatcacggaaaatgccctgcttcacaccttccttaaagaagtttaccgtttcttccgaatcctggttatgacggttcgtcatcagcgcataggctttgggatacttcttgatgtcttcaaagaatttcttattggtggcatggaactgttcgatgctgcgctgatagcatttcagcaggacttccaatacatttccggatgtggcaagtacattcttcaaaaattcatccccttccttctgacctttcagtatgcactcttccaacaaagtttccttatccgaaaagacttcataaagggtacgtttggaaatgcccagtgaagtggcaatatcatccattgtaatactcttgataccgtgcgcagaaaaagcttccaccgcagtgtcaattatcctctctctcagttccggacgggggacaagatgcttggtatattcgctcatttctctttcttttaaaattcaaaaactctttttatccatttttcaaaataaaaacaagcaaatatagaaagaaaacttaattaagcaattaagttttctttcttttctcaaacggttaataaaaattagggatataacagatatacaaggagaaatatcctaataatcaaatttggtgcggctgaggaatgccactgtcttatgaatttccttgtacattacaatatcgtccttcacaaagggaacttccttgcggtattcgcacaggaaacgttccagaatgggcgaagtcttttgcggacggcggaagtcgataccttgcgcggcattcatcaattcaatggcaaggatatgttccagattgtccatgatgcggaacagttttgttgcggcattggcgcccatactcacatggtcttcctgtccgttgctggatacgatggaatcgctgctggcggcataacagtacatcttgttctggctcaccatggaagcggcggcatattggggaatcatgaaacccgaattcagaccgggattggcaaccaggaactccggcagtccacgcaaccccatgatgagctgggcaatgcggcgttcggagatattacccaactcggcaagggcgatgcccagaaagtcgtacgaaatagccaacggctgcccgtgaaagtttccacccgaaatgatgcggtcttcatcggggaagatagtaggattgtccgttacggaattgatttcggtcagcagtaccgaagacacatacctgatggcatctttcgtggcgccgtgcacctgaggaacacaacggaaagagtacggatcctgcacatgcttgccgggacgggcaatgagttcgctgccttccaacagcttgcgaacgttctcgcctgtctcgatttgtcctttgtggggacggatttgctggatacaatccatgaaggggtcgatacggccgtcaaaggcttccaacgaaagggctgctatcaaatcggctttcttggagaggcggaaggctttgaggatggcaaagacaccgttggcgctcataaactgcgtaccgttcaacaaagcaagtccttccttgctcatcagcttgacgggctcccagccgaactcgtcgagtacgctgattgcctcgcgcttcttacctttataatatacatcgcccacaccgataagcggcaggaaaagattggcaagcggcgcaaggtcgcccgatgctccgagcgaaccgcggtcgtagacgataggcatcacatcgttattgaaaaagtcgaggatgcgctgtacggtaatcacctgcacaccgctatgccccaaagaaagcgcatgtgccttgagcagcatcatcagcttgatgatgaccggacgtatctcctcgcccacgctgcaagcatggctcttgataaggttctcctgcaagatgcccacttcgtcttgcgatatattcttactacacaacgagccgaacccggtagttattccatacaaaggctctgccgattcaacggttttcttatccagatagtcgcgacatttctgtatgcgttccttagcttcgggagccagctcaagtttcaggttctcgttaatgatgcgttcgataagttcgaaagtcagctcgcccgaaccgacataatagacattcttcatactttgagctcctcattgatttcgtccaacaattctttttctttggcgcaggcaaggcgttccagttcatcggcttcggcttgcagtttggcaacgaactccttatccttcagcgaaccgaggttaatgcgcacattcatcaaggctcccaacacggcagagcgggccgacatcattgccacgcaggcatcggttacggcattgcagttgcccaggcgggctacgtccataatgacggtcatcagttcgaaggcattgcgcgccacctgcataggcacaagtgcggcaaacttcgtagcttcctgaatggctgcgctgcgggcggccttttcctcatcggtggccttcggcatcttgaagcaggcaaatacgctgtcgtaggcctcggagtcgcggtctatgtcgccgatgaaggtatctttcacttgcaaagccacttcggagatatgtttcatcagttcttcatgctcctcatagcctttcttgccgatagtgaggttggcaaccattgccgccaaagccgaagcgacggctccattcaatgcggcgatgcttccgccgccggggacgggatcgctgcccgccactttattcaaaaactctttgactgttaaatcgactaacatgggatttaagtattaaatataaagtataaagtattagttttctgtttcaaagcaccggataaagcacgccttccttcaccgtggtgtgtacacagttcatccccacgtaatagggcaggaaatggtaattgtccgtgttcagcaccacaaagtctcctttctttcccacctcgatactgccgatgctgtcggcccggttcaaagcggcggctccattcagtgtgagggcggttatggcttcttcgatactcatcttcatatagatacatgccagcgcaaaggtcagcgggatagaaccggagaaacaactgccggggttgaggtcggtggccaatgctacggcacagcccgcatcaatcatctcgcgcccgcgggcatacggctctttcagggcaaaggcggtaagagggagcaatgtggcaaccacgcctttatccgccatggcacggatgtcggcatcggaagcatgcagcaagtggtcggcggagacggcggagagttccgcagccagccccgcaccgcccagcggtacgatttcatcggcgtggagtttcagtgccagtcccatttcacgggcggcggtcagcaagcggcgggactgtccgatagagaacacgccttgctcgcaaaagacatcgcaaaactctgccagccggttttgaacaacggcgggcatgacttcacggataatgaaatccacgtaatcgtccgtgcgtccattgtattcctgaggcactgcgtgcgcgcccagaaacgttggaacgatgtccacacgcttgtgctcgtcattgttcagactgcgcatcacgcggagttgcagcaactcggtttccttgtccaggccgtagccgctcttgccctcgacggtggtaactcccatagtgctcatttgcttcaagaagccctctgccttggcgcgcagttggataaagttgcactcacgcgtagctttcaccgtactgacaatgccgccaccacgctccataatggacatatagctctcgcctttcaaccgccaggagaattcctcggcacgttccccgccaaacacgaagtgcgtatgcgaatcgacaaagccgggcaaaaggcacttgccgcgggcgttgtaatgccagtagcgctgataatagccgtcgcgctcctcgccacggttagggcctacgtaagtgatgacgcctccggtaacttccaccgtagcgtcatcgatgatgcaaagttcttccatttccctgccgcggcgggcggaaaagccgacgggagttacgacacgggcattgaagattatcagattttctgtcatagctgtttctgtttcattttcttccagttactcgcgcagtctgcgtattcctgcactcattccattatccgggcttccagcacctgctgcatcgagaagttctccagtccgaggtaataggaagccgtatcaatcagcgcttccataggtacgaggcctataatctcactgcccacgatgctaacaccgtagcggcgcgcttcgatgcgtaccagttcgaaggcacggtaaagcgccgtgcgggtatagtcggtcatgttgatggatacctgggtaatcccccggtctttcagttccacgcccatagccttacagtagcgcagtccgccgccgatgaaacgtatctttttggcaatgtcgtgcgcaatctccagactcggcgtattgaggttgatgttataggctaccaacggcatgcgtgctcccactgccaccgtacctgcggtaggatgacgttcggcgggaccgaaatcgggttgccattcgggaagctttatcttctccaccatgccctcgaactctcctttacggacagccgcaaggttctcgcggtgaggtgccgaagcggatttctcgtagaggaatacaggcaggttataacgttttgccacttccgcacccacttccttagagagcgcaatggtctcttccatggtcacattcttgattgggataaaaggaacaacgtccacagcgcccatacggggatgctgcccctggtgtttgttcagatcgatgagctgtacggccacgccgatggcttcgagcacggcatcgcggagcggttcgggctcgcccactacggtaaccaccagccggttgtggtcttcatcgttactgtaatccagcaacttcacaccttgtttgccacgaaaaggggctacaatacggtctattttctgcaagtcacgtccctcgctgaaattggggacacattctacgattcggttcataacggttatgtttttggagcttactacagaggagacggtatttttctttgatattatctccggacagacctattattttttcagacagaagaaccaaaggacataaactatgcaggcggatacctgccggacatcacagttgagtttatcctcttaaccttatatatttttgcgcatttgttctttggttctcttatattctgaatatcctttatgttctttggttcttctgtctgaaaaaagaatactcttatgtccttatctcctctataaataagcctgttactattattttatatatttatcaatcagttcttcatccgccacgtaaggcatcgtgatgtgatagccttccgcatgggtgcggttaaactcttcgctggtctccatggcatgtgcatttcgtgcccacgaacggcgtgccacaccgcccatcacatcccaaagcatggcagagcgcaagatttcgtccacccgttcggaaccgtcgcacaccatgccgaagccgccgttaacggccttgccgatacctactccgccgccgttgtgcaacgccacaaggctcatgccccgcgcgcagttaccggcaaagcattgcaccgccatgtccgccattacgttgctgccgtccttgatgttggatgtctcgcggaaaggagagtccgtaccgctgacatcgtgatggtcgcgtcccagcataatgggacctacttcgccgcggcgcaccatttcgttgaagcgcaaggcaatcttcatgcgtccctcggcatcctgataaaggatgcgcgcctgcgtgcctaccaccaggttgttcttctcggcatcgcgtatccagttataattatccaaatcctgtccgcggcgggtagggtcgatgcactccatggcggcacggtcggtctttaccaggtcctcatgcttgccgctaagacatacccaacggaaaggcccgtagccgtaatcgaagagttccggccccataatgtcttccacgtagctggggaagatgaaaccgttcttgtcgctgccgttgcgcgctatttcgggaacgccggcatcataaacggctttcatgaaagagttgccgtaatcgaagaagtacgtgccccggccgacaagctcttttatggcaaggaagtggcgcttcaacgtggcatccaccttacggcggaattcggcaggattctcatgcagcatccgggtacgctcctcgaaagtcagtcccacggggcagtagccgccgtcgtatgccgcatggcaggatgtctggtcggaaagcaggtctatatgtatctgttcctttacggcatattccaaaaggtctaccacattgccgtgataggcgatggaaatcggagtgtgactgtccatggcctctttagccagcgcaaaggcttgcggcagcgaatccgttacgtgtcccacccagccttgacggtggcgggtttcgatacgcgaggcatccacttcggctatgacagccgccgcaccggacatctcggcagctttgggctgggcgccgctcataccgcccaggccggaagagacgaaaagccgtccgcgcaggtcaccgtcctgagggatgccgagcttcagccgtccggcattcaaaagggtgttgaaagtgccgtgcacaatgccctgcggcccgatatacatccacccgccggcagtcatctgaccgtaattggctacacccatctgcatggctgtatgccagtcctgctgattatcatacagccctaccatcattgcattcgtaataatgacgcgcggcgcttcgggtttcgacttgaagagtcccagcggatgcccgctttcgataacgagcgtctggtcatcggtaaggacttcgaggtattgttttatcaggcgatactgcatccagttctggcacacctgccccgtctcgccgtaagtgacaagttcgtaagggtaaagggctatgtcgaaacaaagattattgtctatcatcacctgaaaggccttgccctcgatgcagcgtcctttgtattcgtcgatgggctttgccttgaggtcgccttgcggacggtagcggtagccgtaaatgcgtccgcgcgtacggagttcttccataaactccggagcgagtgtttcgtgcagttctgtagggatgtagcgcagggcattcttcaatgccgtagcggtttgtgccgcgtcaagagtgtagccgcggtcgggcgcccgccggataccttctacgaaggtgggataagggggcagtgttttgcttaaagttatctccatagtatataaggtgaatagttacaaattgtcagaatacactggctcgtatctgccgcaatataaaaataattcccgatattcgcaatagaataccgggaattttatcatttagtcaatagagactccttatcgtattacttgaaatactatctggtccactcatctgctattcaaaaataaacaaaggcaatgaatccactttttttgcataataagaaaagtaacttaatatagctcagagaaatacaaacagaccattttaataaagttgatattgaacggtgagggcagctacagtgccgttatgatccaaagtataatctgtaatcagaatacgaagatacttcacttcatcattctctgtcttgaaagctacagcataaccatgattaggctgagccaccggaaaatctttgacataatatctattgtcatctggtagaatcaacttttttattacttccggtaagctatttactttccctacatcttctatcattacatataaaccattataggattgcacctcaaaggcattataagaagaaaacgtactattccataccccactttgacgtataaaagaaagtacaccaagacacccacgcgagagatacagtccatactttcgattaaaatcttcatagtaaacaggtatttcggcactgctccattttaagttgtatttcaacaccgccgtcttcactgccgttgttgccgtatagtcccctttcacttccgttcccccagctcccggctcatcagtaggttcattatcatcgcttccgcaacttgcacaaaacgtcccgaacaagaacatcaaacagggtaaccaaaataatctcattttcatatctataaatgtttatttaagatatacccggttccaaagtataacaatgtgtttttcaatctcttttgagacagggatacaaaagcgacgtggaaccaaactttattgtacttcaaggttctggaatacctatacactgaataaagttaagcccacgtcgtagagagacgcgggcgttacaactttatattctcagtgtatttgaattttccagattctgaagtacaggaataaaagctaacgctctcttatatatgtctatttcctaatttgtctttataccataggcattcttttttacatttataataaatataataaccgcaaatatataaataaaataattatccgcaacacaagcagacactctttatgcaaatccacccaaccgatagctactccacatttgccctactctattcaacacccggcttacccgccaactgacgcaggtattttccgacaacctctgccgattcgctcgtttctttttcaaaagcctctttcagctccggataatccgccagcagttccagcatcttctccctgcccacaaactccgagcgtcccgtttccggattcaactcataatacacgcgcgcaaagaccagccccgaggcattgatggcatctcccacttcaccgcccagcttggttgcatcgggcggagttgccgtacttgcggcagcctgccccacaggttgcgcacagaaataaatcctgcctttcacccacatggcaggtgcataccagccgccaaagcggtagcgtttataacgcattttcttacaatttacatatagcgacgtatccatccgcaccgcataacagcgagacttcaaatatctgcaaagaccggaattgtccttcgcttctatacggtaatccgctccccccatcagataaatctgattcttggaacgcttctccactttcagtatggtgaccgtatctccacgcccttccaccaactctttcaaattggaatacattatctgctgtgccgaacatggcaagaccaataatgccaatagccctaacacccaacctcttttcatatcgctatcctttctttttgaaactttgcatactcaggcgaaaggtacattttttattgatattcagcaaatatagaagagaaaaaacatcatatttcccgcaaaatcatttgcatatacctatcatcggccttgcatgccgccatcgccgcgaacggaaacctatggtacggaagcccgaagccaccttgccgcaacaagcaagatacgctgctgattacaagcaagatgcaagtaccaacaatgtacctcctgctggtatacgccgtaccaaccgttggtagctcccgtaccaagcagtggtagctctcctaccaaaccgtggtaggcctcgtaccaacccgcggtacttcgaataccgccagccgatatttcgcatatccttaggggaaaaaacatatatttcgttatctttgtcgttctctaaagcatggaaacaaaatggaaagcattgaaaatataaaatcggtctaccagcgtattgaggatgaagcccgatgcgaattgaataaagtacagcaacagatttatcgcatcagcacactgcggctgctgctgttcgtggcaggaattgcggggattatctatttctggacagaaagttgggcagtgctgacgggcattgcacttgtcaccctgctgccgttcattctcctgataaaataccacaaccgcctgtttcaccgcaaagattatctggaaaagaaggcagaggtcaaccggcaggagctggctgcgctggactatgacacatcctgcttcgacggcggcgaggaatttgcagaccctgcacatctgtatgcttacgacctggacgtattcggcacgcattcgctgttccaatacatcaaccgtacctgtaccgaaccggggagacgcctgctggccgactggctggggcagcatcttacaaagaaggaggatatactggagcgccaggctgccgtacgcgaacttgctcccgaactggaattccgccagcggttccgtatcctcggcctgctgcataaaggcaagacagccgatgaaaccgagttgaaagcatgggcggcaagtcccgggatatttcgcaagagcagactcttgcgtgtgctgccggcaaccgttacgggtatcaacggtgcatgtttgcttttggtcgttgccggttacctgccggcaagtatgtggggagtaatctggaccctctttgtcgttgccgggtttgcctttaccggaaagattaccaagatacaagccgtgtacggcaagaaactgcagattctcggaacgtatgccgggctgctcaggcttatggaagcccgccccatgcaatgccgcctgctgaaaagcattaaagaggaaatcggcggcgaacagcggaaagcatccctctccatcagccgtttgagcaagctgatgaacgagttggaccaacgcaacaatatgttcatgtacgtcatcctcaacggactgttcttctgggaactgcggcagattatgcgcatcgaggcatggaaagagcaatatgccggcgaactgcctcagtggctcgacgccctcgggcagatggatgctcttaactcactggcaacctttgcctataatcatcctgcatatgcttatcctactctgcttgacaaggctgatatggctgccgccaaagccggcatctcttccgatgcaaggaaagccggtgcggcaaataccggcagcaatgcccgtttcatactccgtgcaaaggctttgggacatcccctgatgcatcgcgaccgttgtgtgcgcaacgacatcgacatggagaaacgccctttcttcatcatcatcaccggcgccaacatggcaggaaaaagcacgtacctgcgtacgataggcgtcaattatctgctcgcctgtaccggcatgcctgtgtgtgcggaggaaatggaagtgtatcccgcgcgccttgtcaccagcctgcgcaccagcgactccctgaccgacaacgagtcttacttctttgccgaactcaagcgcctgaaactcattatcgacaaactgcaagcgggcgaagagctgtttatcattctggacgaaatactcaaaggaacaaactcgatggataagcagaagggttcattcgcacttatcaagcagttcatggctttagaggcagacggcatcatcgccacccacgacctgctgctgggtacgctcatcgaccttttcccggagaatatccgcaacttccgcttcgaggcggatatcaccgacaatgagctgaccttctcctaccgtctccgcccgggcgtggcgcagaacatgaacgcctgcttcctgatgaaaaaaatggggattgccgtcaccgactaatccccgttttataccgataagctaaagcgctcgcttttatctgcacaaacttacactgccttgcacttagacaggaaagccgagaccgccgctgcctcgctacccgtgaagtaacgtacggaagtcaccggagtataggtgtaaggcacaaactgaaacagttgcaatgcggcaaatttattgtcctgcgaaatcataatgtccatacgtacattaccgctcgattcgctctttatacccgcctcgcagtccggattgccgcgctcaatcatttcggtcagctcacctatatgcttcaaatcaaaaaacatgctgcgctcctttgtcacgcttcccgtaggcaggtacaccatttccttcgacttccagaacaaacggaatacccccagcagaatcaatgccgtgcccactaccatcagcgccatgcttatggtggaagatttatcgtgcatttcaaaaatagaaacaaagataagaagacccgccaccatcatcgccaatgagatgagcagtccggaaacacttgtacgttttgcaatatcgggatgtgaagacgcaaaaagagttgcgtcgatagttttagttgccatattataaacagttttataaattaatgaattattgtaatagagaataagggagtacaatctcttctctatacggacatctatccgatgcccatacacagaaaaaaaacctgaatacaataagacattaaatcagaatccgcctcagtgtgaaaatatagtattcacacacaggcttgcaaccatagtaagcggtggaatcataaagcttctctttatgcaaagacagaaccgcttcgcgccgggcaagcttatccacccagtcctttagtgaaaagatgtattcggcggtataggaacgctgaatgcgggacatggcaagcgagtgcagatgaccgctgttactcgccagctccgctaccggcagatagggcaactgaggtgaagtaaagcatgtgccatcctgagaatgagcggcagtcaccgcctgaatatccgtagaatctcctgtactcaccccgccatcggaagtaaatacagcgcccgacgtctgccacaaagccaacgcaagcaccaggagtcctatgattttcaaatatctgcccataactgtgtgcaaatatagcggtttatttcacaggtttgttttatacacacatcttttaaggtttgttcatgtaaaaagaggattgccaaaatacgtttgattgaatctctaaaaaatcttgcttcgtcataaatagaaaggttatagctgttgcaatattgaagtggcaaaattacaccacaaccataacctttgaagtaggtacttctgttagtgcttaccgtaaaaatgataaaagcgtaaacaaaaaagccgccccaatcgctgggacggctttctatatataaaaagaatagttgaattattctgcttttgcttcttcagcagcaggagcttcggcaaccggtgcagtttcagcagcgggagcagcttcagcagcagcgctcttctttgaacgacgggtacgggtagctttcttagccactttttccttagccatgttttcgttgtagtcaacgagttcaatgaagcacatttctgcgttgtcacccaaacggttaccagtcttgatgatacgagtgtaaccacccggacggtcagcaatcttcacagagatttccttgaacagttcagttacagcatacttgtcttgcaaattgctaaatacaacacgacgagagtttgtcgtatcgtccttggcttttgtaatcaaaggctcaacgaacttcttcagagctttagcctttgcaacggtcgtagtgattcttttgtgctttatcaaagaacacgccatattagccaacatagcgtttctatgagaggcagtacgacccaaatggttgaatttcttattatgtctcattttttattctttatctaatttatatttagaaatatcagttccaaacgacagattcagactttccagcaaatcatcaagctcggtaagcgatttctttccgaaatttctgaacttcagcaaatcggtcttgttgaactgtaccaagtcgcccaaagtctctacatcggcagccttcaaacagttgagggcgcgaaccgagagatccatatcgacaagcttggtcttcagcaactgacgcatgtgcaatacttcctcatcaaactcttcattgccgtcagcatcgttgctttccagcgtaatcttctcatcggagaagagcatgaagtgataaatcagaatctttgctgcctctttcagagcttctttcgggtgaatggaaccatccgtagtaatctcaagcaccagcttttcgtagtcggtcttctgctcaacacggaagttctctacctgatacttaacattacgtatcggagtataaatagaatcgataggaattacgttcacatcggtgcaatattcgcggttttcgtcagcaggaacataaccacggcccttgttgatcgtaatatctatctgcatagttgattttgaatctaaatgacaaataactaattcaggatttaacacttcaaatccagtcaaatacttacctatgtcacctgctttaaattcacttgaattctcgattgtaatacttaccttttcgctctcgaattcttcaactacttgcttgaatctcacttgtttcagattcaagataatgttagtaacatcctcttttactcccggaacactggaaaactcgtgctcaacaccttctatcttgatagtagtgatagcaaaaccttccaatgaagaaagcaggatgcggcgcagtgcattacccacggtaataccgaaaccgggctccaacggacgaaattcgaactttccgaatttagagtccgcttccaacattaatactttatcaggtttttgaaatgctaatatcgccatgaaattaattattatttagaatacaattctacaatcaaatgctctttaatgttttcaggaatgtctgctctttcaggtacgtgcaacagcttacctactttagcattgtcatcccattccaaccaaggatatttgctgtgattaaagccggccaatgagttggcgataacttccaaagatttggatctttcacgaacgccaataacctgacccggttttactgcatatgaaggaatgtttaccacttcgccatctacagtaatgtgcttgtggctcaccaactgacgggcagcggcacgagtcggagcaatacccaaacggaatactacattgtcaagacgaccttccaacaattgaaggagcacctcaccggtaatacctttagcggtagctgccttctcaaacaagttgcggaattgtttttccaaaactccataggtgtatttggctttctgtttctcacgaagttgaacaccatattcagaagtttttctctttcttgaattaccgtgctgtccgggaggatagttcttctttgacaatactttatctgctccaaagataccttcaccgaatttacgggctattcttgattttggtccagtatatctagccatttcttttaaatatttaattgttattcatgaacttaatttgttgcagccgcgattgtagagaagaaattacaatccaataacaatatcaagtttcattttttattaaaggtaaatcttaaactctacgtcttttcggaggacgacaaccattatgtggaagcggagttacatcaatgatttcagtaacttcgatacctgcaccgtggatagttctaatagcagactcacgtccgttacctggacccttcacatatgcctttacctttctcaagccaagatcgtatgctactttagcacaatcttgagcagccatttgtgctgcataaggagtgttcttcttagaacctctgaatcccatctttccggcagaagaccaagaaataatctgaccttcactattagccagagaaacaataatgttgttgaaagatgaatgaacatgcaactgtccattagcatctacctttacatttctcttttttgctgcaactgttttttttgccatatcaacaattattatttagtagcttttttcttattagcaacggttttctttcttcccttacgagtacgggcgttgttcttcgtactctggcctcttacagggagaccgatacggtgacgtacaccacggtagcaaccgatatccattaaacgtttgatgttcaattgaacttcagagcgaagatcaccttctactttatactctgcaccaatgatctcacgaatcttggcagcctgatcatccgtccagtcttttactttcaggtctctgtcaacacctgctttgtccaaaatctttgctgaactactacgacctattccatatacataggtcaacgcaacttcacctctcttgttttgaggcaaatcgacaccaactattcttatagccatatactaaattattttttttgcaaaaataataatattatccttgacgttgtttatacttaggatttttcttgttaataacatacaaacggccattacgtctaacgatcttacactctggcgtacgtttctttaaggatgctcttactttcatatcttaattttatttatatctaaatacaattcttcctttcgataaatcgtaaggagacatttcgactcttaccttatcacccggcaggatcttgatgtagtgcatccgcatcttaccggaaatatgggcagtaatctcatgtccgttttctaattcaacacgaaacattgcattagacaatgcttcaactataactccatcttgttctattgcagattgctttgccatattaacttcttaaattgctttatctcctaatacttcttcaatgaatttgaacgatgacagaatatcggcttcaccgcttctcactgctatggtatgctcaaaatgagcggcgtacttgcaatctctggttctcaccgtccagccatcacgttccattactatctgccggttacctaaagttatcatcggctcgattgcgatacacaacccctttttcaacattgtaccgtaaccgcgcttaccgtagttgggcacctggggatcttcgtgcatgtccttaccgataccatgaccgacaaactcgcgcaccacaccataagaattggactcgcaatgttgttgtatagcatatcctatatcacccaaccgcttgccttgaacagcattctgtattcctatatataatgcttccttagtaaccttcagtaatttgcgaacttcttcgtcaacctcacctacacaaaacgtataggccgagtcgccacaaaagccattcatataagtaccgcaatcaacagaaactacatcaccctctttcagtactacattatcactcggaataccatgtaccacctgctcgtttacagaagtacaaatcgaagccggaaacggatcgccatattggttcggaaatcccttgaaagtaggaacagccccattatctctaatgaactcttccgctactctatccaactcctttgtagtaactccgggctttataaccttagctatctcagccaacgtttttcctacaagcaaattactcgcacggagcagttctatctcatcttcagttttaagaaatatcattcttcaaataagattaatacgcagccactgtaccgctacggcctttaatacgtccagatttcagcaaaccgtcatagtgtctcatcaacaaatgactttcaacctgctggagagtatcaagaaccacacctacaagaattaacaaagacgtaccaccgaagaattgagcaaactcggctttcacaccgaagataccggcaaatgcaggcataatggcaaccaaagccaagaagaaagaacccggcaaagtgatacgtgacataatcacgtcaatgtactctgctgtttgctttcccggtttgatgcccggaatgaaaccgttgtttctcttcatatcctcagccatctgagtcgggttaatggtaatcgcagtatagaaatacgtaaacagtataatcaataccgcaaaaatcaaattataccaaaagcttgtatgatcagttaatgcatgtatgaaaccgctcgcattatttacatttgaaaatccaacgagagtaataggaatgaacatgattgcctgagcaaaaataataggcatcacgtttgctgcatttactttcaaaggaatgtattgtcttgcaccaccgtattgcttgttaccaacaatcttctttgcgtattgtacaggaatctttcttgtaccttgcaccagaagaatggcaaatgcaatgacaagcaacaggactacaagttcaatcaggaacataaccaaaccaccggtcttatcggtcatacgggaaatcaattcctgaaataaagactgcggtaaacgtgcaataatacccaccataataatcaaggagataccattacctattcctttgtctgtaattctctcaccaagccacaaaataaacatacttccagccgccaatataatggtagaagtaagcataaatagagtccaatctaatgaagcatttaaggaaggaccagcctgcattttaagattgagcaaataagaaggagcctgaaccagcaaaatgataatcgtcagataacgggtgtactgattcatttttcttctaccactctcaccttcacgttgcaatttctggaaatacggtaccgcaatacccagcaactgaatcacaatggaagcggagatataaggcatgatacctaatgcaaagatagacgcattagagaacgctcctccagaaaacatgtttaacaaggctaaaagaccctcgcttgtttgttgatgcaactgtgtcaacattgacggattaatacccggcaatacaacatacgaaccgaaacggtaaattgccacaaacaatatggtaatgaggatccgttgtctcagatcctcaattttccatatattctttaatgtttcaatagcttttctcatcgaattagagttttactacttgtccaccagcagcttcgatggcagcaaccgcagtcttagagaatgcgtgtgcttgtacatccaacttagcagtcaaagttccgttacctaatacttttaccaactggcttgaagaaatgaaaccggcagcgatgaagtcattgatacctacagtctgcagatttttagcttcggccaatttctgaattgtatccaagttgatagccttatactctacacggttgatatttttaaagccaaacttaggaacacgacgttgaagaggcatctgaccaccttcaaaaccgattttcttagagtatccagatcttgatttagctcctttatgacctctggtagaagtacctcccaaaccagaacccggaccgcgtccgattctttttcttgttttagtagatccctctgcaggttttaaattacttaagttcatattgtaattcgttttatattcaacaaataattacttaacaatggtaaccaagtgtttaaccttatccaccattccaagaattgaaggagtgcattcgtgttcaaccacacgattcaacttatgaagtcccagtgcatcgagagttctcttctgatcagcaggagcaccaattctacttttaacttgtttaatctttatagtcgacatattcttcctccttatcctctaaatactttttccatactaactcctctgttctgagcaaccatacgggcatcacgcatttcgcttaatgccaaaatagtagctttcaccaagttatgtgggttggaagaaccttttgacttagccaaaacatccgttacaccaacactttcaagcactgcacgcattgcaccacctgccactacaccagtaccgtgagaagccggtttaatgaatacctcagcaccgccaaacttagcagactgttcgtgaggaaccgtacctttcagtacaggtactttagtcaggttcttttttgctgattcaacacccttagcaatagcagcggttacttcacctgctttgccaagaccccaaccgatgataccttcttcatttcctactaccacaatagcagaaaaactaaaagttctaccacctttggttactttggttacacgattaatagcaaccaatctgtctttcagttctatatcgtttgtaatcttaactctattattaagtcctgccataatgattaaaatttaagtccaccgttacgagcagcatcagccacttcttttactctcccatgatacaagtaaccattacggtcgaaaacaacagtagttatacctgcttcctgagccttctttgcaatcagttcacctactttggcagcctgttctttcttaggcatcttttcagtcatacccaaagaagatgcagcagccagagtcttaccggacaaatcgtcgataatctgaacgtagatttgcttattgcttctaaacacactcatacgcggacattcagttgtacctgaaatcttattgcgtactctatatttaatcttaatacgtctttctatttttgttgtcataatactatcaatttaaatgattatttagcaccggctgatttaccagactttctacgaatttcttcgccaacaaacttaatacctttacctttatacggttcaggcttacggaaagaacgtattttagagcaaacttgaccaagcaattgtttgtcgcaagattccaaaaggataagaggattcttgtttctctcagacttagtttctactttgatctcagcaggcaactgtataaagatactgtgcgtataacctaagttcaattcaataatattgccttgattagaagcgcggtaacctacaccgacaagttccaactctttcttatatccttcagatacaccaacaaccatgttgtgaaccaatgaacggtacagaccgtggaatgcatgcttctgcttcggattatccagcattgcattttcattctctgtcaaaacgacatggccttcttcgatggcaacattgatagcaggatttacatattggctcaattcgcctttgggtccctttacggtaaccacatcatccttcagagtaactgttactccagcgggaatactaatgggtaattttcctattcttgacattgctgattcctcctattaatatacataacacaaaacttcaccgccaatcttcagttcagcggcttctttgttggtcattacacctttggaagtagatattatagcaatacccaaaccattaataactcgcggcatctctttgtaaccggtatattgacgcaaacccggagaagaaattctttccagcttcttgatagcgttaactttgttaaccggatcatacttcaaggcaacctttatagtaccttgaggaccatcttctacaaacttgtaattaagaatgtagcctttttcaaaaagaatcttagtgatttcttttttcaaatttgaagcgggaacttcaacaactctgtgctttgcttgaatagcgttccgcaacctcgtcaaataatctgctattggatcagtcatataaaaataaattaaattaatcaggactgccctgacaatatttaaaaaacaaaaattaccagcttgctttctttacacctggaataagaccgttggatgccatctcacggaactgaattctggagattccgaactgacggatatatcctttaggacgacctgtcaatttgcaacggttgtgcatacgaatcggattagaattcttgggcaggtcctgcaatttctgtgcagcttcaaaagcttccgcaggatcacctgttctaacgatttgcttcaatgcagctctcttctcggcatatttggctactaatttggcacgctttacttcacgtgctttcattgattcctttgccatattatcaatcttttttagcgttcttaaacggtaaaccgaattctttcaacaaggcataaccttcttcatctgtttgcgcagaggttacaaaggtaatattcattccgagaattctggtaatactatcgatattaatttcagggaaaataatttgttcctgaataccaagggtatagttaccctttccatcgaacttactttcaatacccttgaagtcacggatacgcggcagagctacacgaaccaatttttcaaggaattcgtacattctctcgcgacgtaaagttaccataacaccaatcggcattttcttacgcaacttaaagttagcgatatctttacgagaaatggttgcaacggccttctgacctgtaatagcagtcatttcattaattgccacttcgataatcttcttatcagcaacggccatacccaaaccctgattgataacaatcttcttaagtacgggtacctgcattgaagaagaatactggaactgtgatttcaatgcaggcgcaatacgctctgcatattctttcttaaggctagcagtattactcattacttaatctcctctcctgattttttagaataacgcactaaagtgccgtcagcacttaattttctaccaacacgcgttgctttaccagtctttggatcaaccgggttcaagtttgaaatgtggatagaagcttcttgcttcacgataccaccttgcgggttctttgcattcggttttgtgctcttagacaccatgttgataccctcaacgattgcacgttttttatcaacaagaaccttcaatacacgaccagtcttacctttgtcttcaccagaatttacgtaaactgtatcgccttttttaatatgtaatttactcattacttaaatcttttacaaaattaaagtacttcaggagcgagtgacacaactttcatgttagcagcacgaagttcacgagctaccggaccgaaaatacgactacctctaatttcacctgcattgttcagcaacacgcaagcattatcatcaaaacgtatgtaagaaccatcagcacgacggatttctttcttagtacgtacgatcaaagctttagacactgcaccttttttaatatcacttgaagggataacgctttttacagaaacaacaatcacgtcccctactgaagcatagcgacgacctgtaccgcccaaaacgcggatacagagagcctcttttgctccactgttgtcacatactgtaagtctggattctacttgtatcataattacttagctctttcaattatttcaaccaatctccatctcttagtcttgctcaaaggacgagtttccatgatgcgtacagtatcgccgatattgcactcattcttttcatcatgagcatggtacttcttcgtcttactaacgaacttaccatatatggggtgtttttccttaaacttagctgcaacagtaatggtcttatccatcttatcgctcagcacaacccctgttctttcttttcttaaatttcttgcttccatcaagctcatcatttattgttaagttctctctggcgtaattcagttttcatacgcgcaatagtcctgcgtaattgtttgatctgagcaggattatccaaaggagaaatagaatgatttaaaaccatttggctatagttagccacttctgcttctactctttctaccaagtcattggtagtcatttctttaatttctgcaattttcatacttcttacgcattttgattttggatatcataatcacgtcttaccacaaacttggttgtgataggaagcttctgtgcagctaagcgcaaagcttcttttgcgatttcataagatactccttcagcttcgataataattctacccggtgtaacaggagcaacgaatccctcggggctacctttacctttacccatacgtacgtcagcaggctttcttgtaataggcttatccgggaaaatacgaatccaaatctgtccttgacgttgcatatatcttgttactgcaatacgcgcagcttcaatctgacggcctgtaatccacttcgtctccaaggccttaataccaaaagaaccgaaagccagttggtttcctctttgggcattacctttttgacggcctttttgttgtcttctgaattttgtctttttcggttgtaacataattcctaaaaatcaaattcgttagcgattatttttctttcttttgaagttctttccgccattgtttccgctattgcttccacgaccgctttctttgctttgcgtaaagttcggagccaactctcttttaccataaacttcacctctacaaatccaaactttaataccgagaagacctactttagtcaatgcttctgcatgacaatagtcgatgtctgctctgaaagtgtgcagcggagttcttccttctttatacatttcagaacgggccatttctgcaccattcaaacgtcctgaaatctgaattttgataccttccgcacccatacgcattgtgttggcaatagccattttgatagcgcgacggtaggcaattttaccttctacctgacgggcgatgttgttagccacgataacagcgtccaactcaggtcttttcacttcgaagatattgatctggatatctttatcagtgaccttcttcaactcttctttcaacttatcaacttcttggccacccttaccgataatgatacccggacgtgctgtacaaacggtaatagtcacgagtttcagtgtacgttcgattacaattcttgaaacacttgctttagcaagacgagcgttcaaatatttacgaatcttgctatcttccagcaaagagtcgccgtaattctttccaccataccaattggaatcccagcctctgataattcctaaacggttgcttattggattaactttttgtcccatttaccttaattttgatcttcgttattacttttagaaccaacgaacaacgttacgtggtttgaacgcttgcggattctgtaacctctaccctgcggagccggtctcattcttttgagtgtagcgccaccatcaacaaaaatcttggttacgaacagctcgccgctttcagctttacgttcgtttttctgctcccagttagcaattgcagagcgcagcaatttttccactctggcggcagcctcttttgaggagaacttcaaaacgccgagtgctctgttcacttccatcccacgaatcatgtcagccacgagacgcattttacggggggaagtaggaacattttgcaatttcgcaaaatacatggtcttaagggcttcttttcttttttcagccgatattttttttcttgctcccattatattattactttattatttcagataaatcctgtcttattttttcttgttaccagcgtgtcctctgaatgtacgagttggagcaaattcgcccaacttgtgtcctaccatgttttcggtaacataaacaggaataaatttatttccattgtgaactgcaacagtatggcctacaaaatcaggcgaaatcattgaagctctggcccaagtcttaactaccactttcttgcccgattcattcatggcaagcactttcttctcaagcttaacgttaatatacggacctttttttaatgaacgactcataatttactcaattaatcagattacttctttcttctctcaataatatacttagacgattgtttcttcggagctcttgtcttaaggcccttagcatacaatcccttacgagatctcgggtgtcctcctgaagcacgtccttcaccaccacccatcgggtgatcaaccgggttcataacaacaccacggttacgcggacgacgtcctaaccaacgagaacgtccagctttacctgaactttccaatccatgatctgagttaccaacgctaccgatagtagccttacatgtgctgaggatctgacgaacctcgcctgaaggcaacttgataacgcagtatctaccttctcttgaagtcaattgagcgaagttaccggctgaacgaaccaaagcagcgccttgacccggacgtaattcgatgttgtgaattacagtaccgaccggaatattctgaagcggaagagcatttccgatttccggagcagcagtttcacctgacatcaaagtcgcaccaacttgcaatccattgggagcaataatatatcttttttcaccatctgcataaaacaacagagcgatacgagccgaacggttcggatcgtattcaattgttttaaccactgcaggtacaccgtctttatttctcttgaagtctacgatacggataatcttcttactaccgccaccgatgtagcgcatggtcattttacctgtattgttacgaccgccggaagatttcttaccaaatacaagagacttttctggtactcgtgcagtaatttcttcgaaagtaccaataattttatgtctttgccccggtgttgtgggcttaaatttacgtactgccatttcttttaaatattgctataaaaatcaatagtatctccttctttcaacgtaacaacagcttttttgtaagcgtttgtacgtccgttgatgatacctgcgcgtgtataacggctcttgttcttgccggcataacgaattgtattcacatcaaccacggtaacgttgtaaagggcttcaacttcgttcttaatttccagtttattagcttcaggacgcacgataaagccgaaacgattgttcgacttatcagtaattgcagtcatcttctctgtcactaacggtttaataataattcccattatttaagcctcctttttacattaagatattgtcgatagcagaaagtgcactttcagcaaacacaacaactccggcgtccaatactctgtaagtatttaaccctgagatagtctgcacattagcgccctttacgttacgagccgacaaatatacgtttttatttgcttccggtaaaacaacaagcagctttttgtcagaaactttaagattttttgtcataacaacaaaatcttttgtcttaggagcttcaaaattgaagtcttctactacaatgatggcattgttctgagccttatatgccaaagctgacttacgtgccagagcttttactttcttattcagtttgaagtagtaatctctcggtttcggaccaaatacacgtccaccaccaacgagtaccggtgagttcatgtcaccacgacgtgcaccaccgccacctttctggcgaccgattttacgagtagaaccgctgatttcgcttctttcctttgacttgtgtgtaccctgacgctggttagccataaactgtttaacgtccaagtagatagcgtggtcgttgggctcaattccgaagatagactcgtttaacgtaatctttctcccagtgtcttcacctttaatgttatatacgttaacttccattatttctcaattattacgattgaacctttgcaaccaggaacagaacccttaatcaaaaggagattgtgctccgcgattacttttaatacttgcagattttgaacagttactctgtcaccaccaagttgtccgcccatgcgcattcccttgaatacttttgcagggtaagaacaagcaccgatagaacccggtttacgggcacggttgtgctgaccgtgagtagtctgacctacaccaccgaaaccatgacgtttcacaacaccctggaagcctttacctttggaagtacctacaacgtctacataatcagcgccttcgaacaattctacggtaacagtatcacccagattcaattctgtctcaaattctttgaactcagccaagtgtttcttgggagttactccagctttcttaaagtggcccataagaggctttgtagtgtgcttttccttcttgtcctggaaacccaactgaacagcttgatagccgtccttttctacagttttcacttgagtaacaacacaaggacctgcttcgataacagtgcatggtacattcttaccctcggcactgaaaacggatgtcattccgattttttttcctaataatcctggcatttcacttaatttttaatacttacactttgatttctacttccacaccactcggtaactccaacttcatcagagcatctactgtcttagctgttgagctatagatgtcgattaatctcttgtaagaagagagttcgaattgttcacgcgacttcttgttaacgaaagtcgaacggtttacggtaaagatacgcttatgcgtagggagaggaattggaccgctaacgatagcgcctgttgtcttcaccgttcttacaatcttctcagctgacttgtcaaccaagttgtggtcgtaagatttcagtttgattctaattttttgactcattactgtcttagttattaatagtgttattatataagataaagtcccgtaggttaagagtcattcgctaacctacggactttagttattattttagattaagtctgtacgaccttttacttcttccaatactgccttggcaatagagttggaaacctgagcgtggtgagaatatgccattgaagaagttgcacgaccagaagtgatagtacgcaacgcagttacgtaaccgaacatttctgccagcggaaccattgccttcacgatacgagcacctgaacggcttgattccataccttctacctgaccgcgacgcttgttcaagtcaccgataacgtcacccatgttttcttccggagtaacaacttccagcttcatgataggctccatcaataccggacctgccttagcgcaagcgttcttgtatgcctggatagcacagatttcaaatgacaactggtcagagtcaaccgggtggaaagaaccgtcgatcaaagttaccttcagtgaatccaacggataaccggccaatacaccgttcttcattgcagttgtgaaacctttctgtacagacgggataaattccttaggaatattaccgcccttcacttcgtcaacaaactgcaagccgccttgagtaaagtcctcatcaaccggaccgatgttcacgatgatatcggcaaacttaccacgaccaccagactgtttcttataaacttcgcgcaagttaacagtcttcgtgatagcctccttatagttaacctgaggtttaccctggttacactcaaccttgaattcacgcttcagacggtcgatgataatatccaagtgaagctcacccataccggaaataactgtctgacctgtctgttcgtcagtcttaaccgtaaacgtcgggtcttcttcagccaatttagccaaaccgttagacagtttatccatatccttctgagtcttaggctcaactgcgataccgattaccggttcggggaagtccatagattccaatacgatcggtgcggtttcgtcgcacagcgtatcaccggtatggatatccttgaagcctacaccggcaccaatatcaccggcgccaatcacctcaacaggattctgtttatttgagtgcatctggaacagacgtgaaacacgttctttcttaccagagcgagagttataaatataagaaccggcttcaatcttacctgaataaacacggaagaaagtcagacggcctacatacgggtcggttgcaatcttgaacgccaaagcagaagtcttttcatcctcgctcggcttacggtcttcttcagcaccggtttcagggtttgtaccaaccacattctctgtatccagcggagaaggcaagaatgcacaaacatagtcaagcaaagtctgtacacccttattcttgaatgaagaaccacacaacataggaacaacagccatctgtactgtagcgttgcgaagagctctcaatatttcttcttccgtaatagtagaaggatcatcgaaatatttctccatcaaagcatcgtcgaactcagctactttttcgagcatcttatctctccattcgttagcttcgtctaccaaattagcagggatttcctctactgtatagtcggcacccatagtttcgtcatgccagtagatagctttcatcttgataaggtctaccaaacctttgaaagattcctcagcaccgataggcacaacgataggacaaggattagcacccaaaacgtccttcatctgacgaacaacctcaaagaagtcggcacccgaacggtccattttgttaacgtatgcgatacgcggtacgttatatttatcagcctgacgccaaacagtttcagattgcggttcaacgccaccaactgcacaataagcagcaacagcgccgtcaagaatacgcaaagaacgctctacctcagcggtaaagtcaacgtgtcccggagtatcaatcaagttgattttataagtattaccggcatatttccaacgagtggtagtagcagcggaagtaatagtgataccacgttcctgttcttgctccatccagtccattgtagcggcaccatcgtgcacctcaccgattttgtgagtcaaacccgtataaaacaaaatacgttcagaggttgttgtctttccggcatcgatgtgggccatgataccgatattacgtgtcaaatgtaaatcattctttgccattttctaattccttttactttaagtttttaatctttgattggttatctcttatagtattagaatctgaaatgagcaaacgcgcggttagcctcggccattctgtgcatatcttctttacgtttgaaagcaccgccttgttcattgaaagcatccatgatttcagcagccagtttgtcagccattgatttaccgccacgcttgcgggcaaagataatcaaattcttcatagaaattgactccttgcggtcaggacgaatttcagtaggaacttggaaagtagcaccacctacacggcgagacttcacttccacttgaggagttacgttgtccaaagcttttttccagatttcaagagctgatttctcttcattctgcattttgttcttcactgtttccaaagcggcgtagaagatttcataagaagtattcttctttccgtcgtacatcaggtggttaacgaacttggaaactttcacatcattaaaaacgggatccggaaggatgatacgttttttaggttttgcttttctcatttgtctgaaagaataatgtttttcgttcttggttgtttacttctgtcttcttcaactctccctccggagtgtttactcaacctttagcatttccaacaaactaaaacgtaagttattacttttaattttactgtttatcagtttggccgcctaattatttcttcttagcgggagcagcctgtcccggtttcggacgtttagcaccgtatttagaacgtctttgggtacggttagcaacacctgcggtatccaaagtaccacgaacgatgtgataacgtacacccggaaggtcttttacacgaccgccgcgaaccaatacgattgagtgttcctgcaagttgtgaccttctcccggaatgtaagagttcacctctttaccgttagtcaaacgtacacgagctactttacgcatagctgaattcggtttcttcggagtggttgtatacactctcacgcaaacgccacgtctttgaggacaagaatccaaggctggagacttacttttctctaccaaaacctcgcgtccttttcttactaattgctgaattgtaggcattttaattgtttttagttatatattatgtttatattaattcaaaactatatacttttgggctgcaaagatactaataagttttgaataatcaatgcactacaagtttttttttgattttatgcttcacccttaatgttaggcaatggcggaataggttgctcatccggcatgcggatagggccgaaagcacgttcatatttaccaacattttcttcaagcgcacgcagcagacgcttggcgtgttcgggtgccaatacaatacgcgattgaactccggctttgggcattcccggcattacccgaataaaatccatgataaactccgaactggaatgagtgataatggcaagattggcatacgtgccttgggccacttcttctttcagctctatctgtaactgtccgttattattttcctgattttccatattatcgtatatcattataattgaatgacaaatatacttctttcattccgacacacaaaatactccaagataaaagtaacagtacgacctgaacaaaaaaggcacttgatatgtcctgaaattgcatggtctgttcgtatagaacacatcgtctgatttacctgaacagaccatgcgtttaccccaaaccgatggtctgttttatttgaggcaatagcatgcttccccctcctccccttcaccctcaaacatccatgaataaaaggttgtgaaggaggcatgcaaatctttattttgctattacattacactcttcttacatcagaccgaaaagagagccggtttgcaacaaatataaaaaaagaagagaatcccgggagattctcttctttcactataaaaattactgattgtattaacgtagtaattactcttctaccttatcatcaactgcataatcgagcaccgttttcttgttggcaagcatacgatcgtactcttctttcgaaccgacaataatcttctcgaattcgcgctgacctgtaccggcaggaatcaagtgaccgcagataacattctctttcataccttccagacggtctacctttccgttgatagcagcttcgttgagtaccttcgtcgtttcctggaaagaagcggcagacataaagcttgaagtctgcaaagccgcacgggtaataccttgaagaatctgtgtagaggtagcaggcacagcatcacgtactgaaacgggtttcaagtcacggcgcttcagcatggagttttcgtcgcgcaacttgcgggcagtaacaatctgtcccggttgcaggttctgagaatctccggcatctactacaactttcttgccccagatacggtcgttctcttccatgaattcgagcttatccactacctgttgttccaagaagcgggtatcgcccggttcatcgatttcaaccttacgcatcatctgacgaacgataatttcaaagtgcttatcgttaatcttcacaccttgcagacgataaacgtcctgtacttcgtttacgatatattcctgtactgccgtaggacctttaatggcaaggatatcggcaggggtaatggcaccgtcagacaacggagtaccggcacgcacgtagtcgttctcctgtaccagtatctgtttggacagtggtacgagatatttcttaacttctccggtcttagaggtaacgataatttcgcggttaccacgtttcaccttacccattgtgacctcaccgtcaatttcggaaaccacagcaggattggacgggttacgtgcctcgaacaattcggtaacacgaggaagaccacccgtgatatcacccgccttaccaacggcacgcggaatcttcacgattacttcaccggcttttaccttctgtccgttttccactactacgtgaccacccacaggaaggttataggtacggataagttcgccatcttcagtcatgatgtgcgctgtaggcactttcgtcttgtccttagactcaatgatgatgatttcgcgcaaaccggtagattcatcggactctaccttataggtaacgttttcaataacgccttcaaactcaatcttaccggtagcttcggtaatgataactgcgttgaacgggtcccaacgggctataagtttgcctttctctactacttcaccatccgctgcatagagtgtagaaccataaggcacgttatgcgtagaaagtatgatacctgtattgacatctacgaaacgtacttctgccagacggcctactaccaccttagccggttcgcctgcttcgtcaataatatctactgtacggagttcttcaaattccagacgggaaggattcttggcaacaatacttgcattggcagcgatattggctgccgtaccaccggcatggaacgtacgcaacgtcaactgtgtacccggctcaccgatagactgcgcagcgattacaccgacagcctcacctttctgaaccatacggcttgtagccagattacggccgtagcacttggcacaaacacccttcttggattcacaagtcaatacagaacggatttcaacgctctcaatcggagagtcttcaatcttctgtgcaatggcttcagtgatttcttcaccacctgcaacaagcaattcaccggttgtggggtgaacgatatcatgtacggatacacgtcccagaatacgttcgtacaatgtagcgattgtctcatcgttattcttcaaagctgtacaaaccagtccgcgaagcgtaccgcagtcttcttcgttgataatcacatcgtgagatacgtcaaccagacgacgggtcaagtatccggcgtcggccgtcttcaaagcggtatcggcaagacccttacgagcaccgtgagtagagataaagtactccaacacggaaagaccttccttaaagttagaaagaatcgggttctcgataatctgaccgccttcggcacctgccttctgaggtttcgccatcaaaccacgcataccggaaagctgacgaatctgctccttagaaccacgggctccggaatccaacatcatgtatacggaattgaatccctgatcgtcgctcgaaatagttttcatcaaaatgtttgacaactcggagtttacatgtgtccagatatcaattacctggttgtaacgttcgttgttggtgatgaaacccatgttatagttgttgattacctgctctacctcttcgtaacctttctgcaccagcgcttctttctcttcgggaataataatatctcccaagttgaacgaaagaccgcctttgaatgccatctgataaccgaggttcttgattccatccaggaattcggctgcttctgccacaccacaaaccttgattacgtgactgatgatgtcacgaagtgacttcttagagataatcgtattgatataacccgctttggcaggtacaatttcgtttacaataacacgacctaccgacgtgtcgtgcatcatcttgtctaccacattaccgttttcgtcaatgtccttaacgataacgctgataggtgcgtgaatgtcgcacttaccttcgttgtaggcaataagcgcttcttccggaccgtagaaagtgaggccttcacctttagctcctttacgcagtttggtgatatagtacaaaccgagtaccatatcctgtgcgggcactgtaataggcgcaccgttggcagggttcaagatattatgtgactggagcatcagcatctgtgcttccagaatagcttcgttgctcaaaggcaagtgaacggccatctggtcaccgtcgaagtcggcgttgaatgccgtacatgccaacgggtgcaactggattgccttaccttcaatcatcttcggctggaacgcctggatacccaaacggtgcagtgtcggagcacggttcaacaataccggatgtcctttcattacatgttccagaatgtcccagataacaggttccttacggtctacaatcttcttggcactcttcaccgtcttcacaataccacgctcgatgagcttacggataatgaacggcttgtagagctcggccgccatgagtttaggaataccgcactcacccattttcagttccggacctacaacgattacggaacgtgcagagtaatcgacacgcttacccaacaagttctgacggaaacgtccctgcttacctttcaaactgtcggaaagtgacttcaaaggacggttggcatcagtcttcactgcgcttgacttacgagagttatcgaataatgaatcgacagcttcctgcaacatacgtttctcattacgtaaaatcacctcaggagccttgatttcaatcaatctcttcaagcggttgttacggatgataacgcgacggtaaaggtcgttcaagtcggaagtggcgaaacgcccaccatccaacggaaccaacggacgaagttcgggcgggataaccggtacgatacgtacaatcatccattcgggcttgttgcgtccgcgtgatgcacggaaagactcaactacctgcaaacgcttcaaagcttcgctcttgcgctgttgtgaagcatcgctgcctgcacggttacgcagttcgtaagacaatgaatcaagatcaatgcgcgacagcaagtcataaatggcttctgcacccatcttggcaacaaacttattggggtctgaatcttcaaggtactgattatcgcttggtaacttttccaacagatccagatattctccttcttcaagcaaatcatactgtgccacttcgccttccaatatacccggctggattactacataacgttcgtagtaaataatagcatcgagtttcttggtcggtaaacccagcaagtaaccgattttattaggaagcgaacggaaataccaaatgtgagccaccggcacaaccagctgaatgtgtcccatacgctcacgacgtactttcttttctgtcacttccacaccgcaacggtcacacacaatgcctttgtaacggatacgtttgtacttaccgcaatggcactcataatccttaataggaccgaagatacgctcgcagaacaaaccgtcgcgttccggcttatacgtccgatagttaatggtttcaggctttaaaacttcaccactcgaattctcaaggatttcttcgggagaagccaaaccgatagagattttcgagaaattactctttatcttgttatcttttctaaaagccatacttttatatataattgataattgagaattaaaaattgaaaaacaatgttgataagtcgggaattgagaatcaagagacattagctctcaaccctcaatttccaaatttcaatttattctaagttgatgctcaagcccaaacctctcaactcgtgcaacaatacattcagtgattcaggaatacccggagctggcatcggctcacccttaacgattgcttcataagccttggagcgtccgacaacatcatcagacttgatagtcaggatttcctgcaggatatgcgcagcaccgaatgcttcgagcgcccaaacctccatttctccgaaacgctgaccaccgaactgtgccttaccgcccaacggctgttgcgtaataagcgaataaggaccgatagaacgtgcgtgcatcttatcttcaaccatgtgaccgagtttcaacatgtatgtcacacccactgtagcctgctgttcgaaagcctcacctgtaccaccatcatacaaagtggttttaccataacggggcagaccggccttgtcggtccattcgttcaggtcatccagcgtagcaccatcaaagataggcgtagcaaacttaactcccaagttctttccggcacgtcccaaaacagcctcgaatatctgaccgatgttcatacgtgaaggcacacccagcggattcaatacaatatctaccggagtaccgtctgccaagaatggcatgtcttcctgacgtaccacgcgtgaaacgatacctttgttaccgtgacgaccggccatcttatcaccaacaccgatcttacgcttcttggcaatataaaccttagccatctggatgatacctgcaggcaactcgtcgccgatagtaatagcaaatttcttacgtttcaactctgcatcgagttccttatatttcttgataaagttcgttaccagtgcacggatcaattcattggtatgctcgtcttttgtccaattgctcaactgaatagcagtaaagtctatatcactgaaatcagaagcatagaatttagcacctttactgattacttcagctcccatatagtctttcacaccttctgaagtatgattttctgtgagcttcaaaagcttatttaccaatattttcttcaaatcagccaccttgctatcgaactcatcatcaatcttcggcaacaatgccttgtcggccaatttagaactacgagtcttgataacgcgggagaacagacgtttaccgataatcacacctttcaaagaaggagatgccttcaaagacgcatctttcacatcaccagccttatcaccgaatatggcacgaagcaacttttcttccggagaagggtcagactcccctttcggagtaatcttaccaatcaaaatatcacccggctcgatacgggcacctacacgcacaataccattctcgtcaaggtctttggtagcctcttcacttacattaggaatatcggaagtcaactcttccataccgcgcttcgtttcacgaacttccaaagagtattcctctacgtgtacggaagtcaaaaggtcttcgcgaaccacacgttcgttcaatacgatagcgtcctcatagttgtatcccttccaaggcatgtaggcaaccaacaggttcttacccaaagcgagctcgccctgttcggtcgagtaaccctcggtaaggatttgtcccttcgtcacacgctgacctttctcgcaaataggacgaaggtcaatcgtcatgttctggttggtacgacgccatttgggaatagtatattctttcagtgcagattcgaagcttacaaactcttcctcttccgtacgatcgtacagaatgcggatagtcgtagcatctacaaagtcaaccacaccttcgccctcagcagtaatctgcgtacgagagtcacgtgcaagctgacgttcgatacctgtacctacaatcggagcttcactcttcaacaaaggaactgcctggcgcatcatgttcgatcccatcaacgcacggttagcatcgtcatgttccaagaacggaatcagagatgctgcaatagaggcaatctgctgtggcgatacgtccatcagctctacctcatcaggagctacaaccggataatcggcatcctgacgggattttactttgtcgcggacgaaagttccgtcttcattcaaaggtgcattaccctgagcgataatcttctcttcttcttcttcggctgtaaggtaaaccaaaccttcatctgaaaggtctacctttccgttagccaccttgcggtacggtgtctcaataaaaccaagctgattgattttagcaaacacacaaagtgaagatatcaaaccaatgttcggaccttcaggcgtttcaatcggacaaagacgaccgtagtgagtatagtgtacgtcacgcacctcaaaaccggcacgttcacgtgacaaaccaccgggacccaaagctgacatacggcgcttgtgagtgatttcggcaagcgggttggtctggtccatgaattgtgacaaggcatttgttccgaagaaagaattgataacggaagaaatagtcttggcgttaatcaaatcgatcggagtaaagacttcattgtcacgaacgttcatacgctcgcggatagtacgggacatacgtgccaaaccgatagcaaactggtttgacaactgttcgcctaccgtacgtacacgacggttgctcaagtggtcaatatcatccacatctgcttttgagtttatcaactcaatcagatacttgataatctcaatgatatcttccttggtgagtacacggacatccatgtcagtcgtcaaattcaactttctgttgatacgataacgacctacatcacccaagtcgtatctcttttctgagaagaataggttattaataacctcacgcgcgctggcatcatcggcaggatctgcattacgcaactgacgatagatataaagcactgcttctttttccgaattactggggtccttctgcagagtgttatatatgatagagtagtcagactggttcggttcttccttatgtacaaggatattctgaacgcctgactctaatataatgtcaatatgttccggctcaattatagtttcacggtcgataaccacttcgttacgctcaatagaaacaacttcaccggtatcttcgtctacaaaatcctcaatccatgttttcaatacacgtgctgccaacttacgacctacaatcttcttgaggttcgtcttattcactttcacgtcttccgccagattgaagatttcaagaatgtccttatcattctcaaaaccgatagctctcagcaaggtggttaccggtaacttcttcttacggtcgatataggcatacatgacattgttgatgtcagtagcaaactcaatccaagatcctttgaacgggatgatacgggctgagtacaacttagtaccgttggcatgcacgctttgaccgaagaatacgcccggtgaacgatgaagctgcgacacaacaacacgttccgcaccattgataacgaatgtagccttatccgtcatataaggaatcgggcccaggaatacatcctgaataaccgtatcaaaatcttcgtggtcagggtcggtacaatataatttcaattttgcctttaagggtacgctataagtaagccctcgctctatacattcgtctatggtatagcgcggcggatcaatatagtagtccaaaaactcaagaacaaaattatttcttgtatcggcaatggggaagttttcagcaaatactttatacagtccctcgttcttacgtttctcgggtggggtatccagttgtaaaaagtctttgaatgacttcaattgtacttccaggaaatccggatattccagcggattcttagtcgaagcaaaattaactctttgatttacagtatttgaagacatctgttaatggatttgtagaacttaattttaaatatatacacaaaaaggtaaagaacccttttcacgaagggttccttaccgaattacctgatttacaggctaatgttatttaagttcaacttcagctccagcttcttccaatgttttcttcaatgattctgcttcgtctttagccaaaccttcttttactacgctaggagcaccgtctaccatgtctttagcttccttcaaaccaagaccgcaagcttccttaacggctttaactacttgaagtttagctgagccagcgctcttcaatactacatcgaaagaagttttttcttcagcggcagcagcaccaccagctgcagggccagcagcaacagcaacagctgcagcagcaggttcaataccgtattcttctttcaggatagttgcaagttcattaacttcttttactgtcaagttaactaattgttctgcaaaagctttcaaatctgccatttttgtatgattttaattgtttaattactaaaataaattgatgtttttttgtttccgaagttacgcttcgggacgttcaccgagagtcttgagaactccgtgaatggtgttaccacctgattgcagagcagaaataacattcttggccggtgattgcagcaaggcaacgatttcggcaataacttcattcttactcttgatacttacgagagcatccaactggtcagcaccaacatagaagctttcttctgcatatgcagctttcagtccgggaataccgttctttgctttatctttcagcagtttcgcaggtgcattcgctgtattgcaaaacattacagcagtcgtacctttcatgcaaccgtaaagcggagaataatcctcttccaggctttccaatgctttatgaagcaatgtattcttaactaccatcaatttgatgtcagccttgaaacacaaagctctcaacgcgcttgtatcagcagcgttcatagcagtggtatctatcaaatagaagtgaccgtattccttaactgtagcagcaatctgctcaataatcgtacttttatcttcctttctcattattactccgttttattagatttcttctacagatttcgggtcaatcttgatacccgcactcatcgtgctagaaagataaatactcttgatatatgtacccttggctgcggtcggtttcaatttattcaaagtagagatgaattctttcgcattgtcgcgaatttgatcagcactaaatgaaactttaccgatagaagtatgaacgataccgctcttgtcaactttaaagtcgattttaccttgttttacttcttttacagctttagcaacatccatagtcacagtgccactcttcggattcggcatcaatccacgaggaccgagtacacgaccgagcgcaccaatcttacccatgatagacggcatagtgatgattacatcaatatcagtccatccacctttgatcttttcaatatattcgtcaagaccaacatagtcagctccggcttcttttgcagcagcttcagcatccggtgtacaaagcaccaaaacgcgtgtaaccttaccagtaccgtgaggaagtgatacaacacctctcaccatctggttagccttacgcgggtcaacgcccaaacgtacgtcgatatccagagaagcgtcgaacttagtaaaagtaatttcctttaccaattgagcagcttctttgagagagtatgctttccctgcttcaattttttctgcagccaacttttgattttttgtcagtttactcattctaattgaagtttattagttattaaccgggaactccccttttacagcgatacccatactacgagctgtaccggcaaccatcttcatggcagcttctacagtgaaacagtttaagtcaaccatcttgtcctgagcaatcgtacgaacctgttcccaagtaatctcggcaactttcttacggttaggctcagcagaaccactctttaccttagctacttcaagtaattgaatagcaacgggaggagtcttgattacaaaatcgaaagacttgtctgcgtagtaagtgataatcacaggaagaatttttcctgctttgtcttgggttctggcgttgaattgcttgcaaaactccatgatgttgattcccttagaacccagagcaggtccaacgggaggtgatggatttgccgcgcctcctttaatctgtaatttgattagtccagcaacttctttagccattttttaattgatttatatataaacattaatgaagaatattacagcgtaacacctgtcctattctttttctacttgcataaagcccaattcgagcggagtcttccgtccgaatatctttaccatgaccttcagtttcttcttctcggtattcacttcttcaatgattccgctaaagccactgaacggaccgtaattcacttttacagtctcgccgactacatacgggatattcagttcttcaccggcatcctgcaattcgtcaactgtaccaagtatacgattcacttccgactgtctcagaggaacgggtttttccgatccacccaagaatcctatcacattaggagtatttctcagatggtgagcgacctcaccaaccagagcagcctccaccaaaacgtaaccagggagataacttctctctttcacaattttcttaccattgcgaacctgatataccttttcggtaggaatcaacacctgagacacataatcaccaaggtcactgtttttgatatcagcttcaagatattcctttaccttagtttctttaccgctaatagcacgcaaaacgtaccatttcttttcaatctcagacatttctccttcttttttaatgtggataaacaaattccattaaatgctggaaacagaagtccatcgcaaataccaccagtgcaataagcagggaagcatataaaacaactactgcactgttagtaagttcagaatacgtaggccacgacactttatgaacaagctcgtcgtaagtttctttaaaataagctactatcttcttcatttcaaaaatattagcacgggaggagaggctcgaactcccgacacccggttttggagaccggtgctctaccaactgagctactcccgtgtgaacataatcagttcccagtaaataccgggaactgattaagatatttggttattagtcgagaatttcagtaatctgaccagaacctactgtacgaccaccctcacggatagcgaaacgcaaacctacgttcaatgctaccggatagatcagttctacagtaatttctacgttatcgccaggcattaccatttcagttccttccggaagagaaatttcacctgtacagtccatagtacgcagatagaactgaggacggtatttgttgtggaacggagtgtgacgaccaccttcttctttcttcaaaacatagatagaagctttgaacttagagtgaggtttaatctgacccggcttacaaagaaccataccacgtttgatttcgttcttatcgataccacggagcaacaaacctacgttatcaccggcttcaccctgatccagcaatttgcggaacatttcaacaccagttacaacagacttcttgtcttcacccaaaccgaggatttcaacttcgtcacctacatggataacaccagcttcgatacgacctgtagctacagtaccacgaccagtaattgagaatacgtcttcaaccggcatcaggaacggtttatcaatatcacgcggaggcaatggaatccaattgtcgcaagcatccatcaattccattactttttcttcccacttttcaacaccgttcaatgcaccaagagcagaaccctggatgaaaggagtgttgtcgccatcgaattcgtaagctgaaagcagttcacgcatttccatttcaacaagttccagcatttcagggtcatctaccatatcgcacttgttcataaacacaaccagtctaggaacgtttacctgacgagccaacagaatgtgttcacgagtttgaggcatcggaccatcggttgcagcaaccacgatgatagcaccatccatctgagcagcacctgttaccatgttcttaacgtagtcggcgtgacccggacagtctacgtgagcatagtgacgattagctgtttcatactcaacgtgcgaagtattgatagtaatacctctttccttttcttcaggagcgttgtcaatctgatcgaatgattttacttcagaaaaacctttcttgcctaatactgtagtgatagcagcagtcaacgtggttttaccgtggtctacgtgaccaattgtaccaatgtttacgtgcggtttggtacgttcgaatttctctttagccatagctttacttgttatttatttgattaataatcagcttttacattttatgagctgttaccgggacttgaacccgggacctcttccttaccaaggaagtgctctaccgctgagctataacagcaagaaaaccggagttgtgggcaaagatggattcgaaccaccgaaggcgtaagccagcagatttacagtctgccccatttggccactctggtatttgcccaatcatagaactctttttctttttctgaatcctctcgggcgttcccaccctttagtgataattcattttgagcctcttgtcggattcgaaccaacgaccccgagattacaaatcacgtgctctggccaactgagctaaagaggcaatctttttaaaaatgcaaccgcaacgttctaccgcgagcgaaacggctgcaaatttagacatttattttttacccgcaaaattttaagcggatttttatttacttcgttgtttttccttgtatttaaccagctgtttttccaaagcttccagacaaagatccactgcttcttcaaacgtatcacaaaccttattcgcataaagctcaccgttgggcaccaatactttcaccccggcttctttattttcggctgtttccggtttaactacctttaatgacacctctactttctctatatcatcgtaaaatttctccaatttagcagctttcttctgaataaaagcctgcaactgctctgacgcatcaaagtgaatcgattgaattctaactatcatacttacctcctttttttaggctcgaggatgagcctgattatacacttttttaagctcttcaaaagtagtatgcgtataaacttccgtagtcgccaaactttcatgccccaacagctcttttatcgagctcaaatcagcaccattgttcagcatagccgttgcaaaggtatgcctcagcacatgcggacttcttttttttacagttactacctttgacaggtttcgtctcacaatatatgctacgataccgcggccaagcctttctccattctttcggacaaaaaaagcatccgaacgaaccggcaatgcttgattccgcacattgacatactcctgcatggaacgccccagttccttatcaaaaggtatcagacgttgcttattccgttttccggtcactttaataagagaagcagaaaaatcaacatctttatcatccaaccctatcaattccgaaagcctcatacctgtcgtataaaacatttcgataatcaaacggtcgcgatacccttcaaacctttctccaaagtcgacatcatccaacaacctatccacttcaccttctctcagaaagacaggaagcggtttcttttttttcggccctgttactctccgtaacggatctgccgccaccaatcctttctttaaaagatacttgtaatatgtccggacagaactcaactttcgattcaccgtattaggcgcataacctttatccatcagggaaacaatccattcacgaataagatccacacctacatccgacggggctaaatctcccaacagcttctcaccaaacttctgcaactcaagaatgtccgtccggtaataccttacagtaccttcagaataattccgttcatacagaagatagtcgagaaaagaatctgtcaacagcatatcgttacatctaaatcatgcaacgaatgtatgaaaaagaattcaataattcaaaggaaattacgaattattaatcttctacttgttgaagttgctgaacgtaaactgcatgctctttcttaagtcttttagtcacagacggtttatcaaactgttgtctgcttctcaactctttaacgataccagtcttttcaaattttcttttaaatttcttcagcgctttttcaatgttttcgccttcttttacaggtactacaatcatttttttgtttttaaaatttaaatggtttataaaatctcacgattaaattgagcggcaaaattacacatactttctttattcacaaaactttcgacaaaaaaatcgacaatcctaacataaaatacctgcctttcttactgacagttatcaaaactgcccgcagataagatttcacttacagaagcaacaatagataaaataacagaatttactccatgtaatacaagtaaagtgagtatctttgaaaacgcttatcaacaccttatacagtatgaatttaacaattaatgaacgtattgccgccttgcggacacacattgtccaagaaaacatacaggcattcatcattccaagcacagaccctcacctcagcgagtacgtagctccccactggcagtcgcgggaatggatttccggatttacaggttcagccggcacggtagttataacagcagaagaagccggtttatggaccgactcccgttatttcctgcaagccgcccggcagatagaaggaacagaaatcacattatacaaagagatgttgcctgaaacgccaagtattccgacattcttgaactcacgcctgcaagagggagacaccgtaggaatagacggaaaaatgttctcggccaaaaaagtggagcatctgcaagaagcattgagaaagagcggtattcatgtaaaaagtgttgccgaccccctgcaactgttatggaaagaccgcccggcaatgccattgtctcccgcgtttattcacgacacacaatatgccggcaggagctttacggagaaacttgcagccgtccgaaaagagatggacgcaaacggtgctgagtctttgctactgtcggcactggatgaaatagcctggctgctcaacattcgaggaaatgacgtacactgcaacccggttgttgtcagctacctgctgatagagaaaaacgcagtgcattatttcatccaaccgcaaaaagtcacagcagagctaacttcctattttaacgttaatggtatctccgtacatacatatgaagaaatagaagattaccttaaccacttccctgcaagaagcatactggcagattccgccaaaacaaattacgccatctactcggcaatcaatccgcaatgccggataatcgacggcacatcccccgtaactctactgaaagccatccgcaacaaacaggagatagccggcatccatacggctatgcaaagagacggcgtggcattggttaaatttctgaagtggctggaagatgccgtccctacaggccgggaaacagaaatcagtatagataaaaagctacatgcttttcgggctgcacaaccactttacatgggcgaaagctttgatacgattgccggctataaagaacatggagccatagttcactatgaagccactcccgaaacggatgtaacactgaaagcggaaggctttcttttactggactccggagcccaatatctggacggaacgacagatataacccgtaccatcgcacttggcaacttgacggaggaagagaaaaccgattacaccttaatattgaaaggccatatcgcactggcaacggcggtattccctgaaggcacccgcggagcgcaactggacgtattggcacgcctcccgatatggaagcagcacatgaattatctgcatggaaccggccacggagtgggacatttcctcaatgtacacgaaggaccacagagcatccgaatgaacgaaaatcccattcccttgcaaccgggtatggtcacttccaacgaaccaggcgtgtacaaggccggaagccacggcatccgcaccgaaaacctgttactgacagtccctgccggcgaaggtatgttcggcaattatctgaagttcgagaccatcacgctctgtcctatctgccggaaaggaatcatcaaggaattgctgactgccgaagaaatcgaatggctgaacgaataccatcgagttgtatacgaaaagctatctcctgacttagacaatgatgaaaaagagtggctgaaagaagcatgtaaaccattaattattaaccgataaccaacagaaaaaaaaatggcactaataaaatcagtaagaggtttcactccggaaatcggagagaattgttttttagcagataacgctactatcatcggagatgtaaaaatgggacgggattgcagcatctggttcagtaccgtactgcgcggagatgtcaactccatccgcatcggaaacggtgtaaacatccaagacggaagcgtactgcacaccttatacgagaaatccaccattgaaataggcgaccatgtatccgtaggccacaatgtaaccatccacggagctgcaatcagggattatgcacttataggcatggggtctaccattctggaccatgtcgtagtaggcgaaggcgccattgtagccgccggctcattggtacttagcaacaccgtaatagaaccgggaagcatttggggtggcgtacctgccaaattcatcaaaaaggtagaccccgaacaggcaaaagaactaaaccagaagattgcacacaactacctgatgtactcaagctggtacaaggagtaaaggtatcggctgtctctcaaaaggagactgcctacatataggaaaaatgaaagcgtcacaactcattctttgagaagacaaactttttaacttgaaattagaacatcctaaaagactaaagaaaagggtcgtatcattactctcaaaacggagtttgatacgacccttttagaggttataattacagtctgtaacttttcagagtctcgttttagttttgacaacccctcatattttttatggaaagaggtctttggcaacctcttcaacagtctaaaagtttatcatgcccaaaactttgtccgttgctccggcattaccggttacataagtccccgcattcgtaccggtctcgcgcaagaagctttcatcttccagcatacggtcgagcaacgctttcagttcttcataactcttgacagagaacccgccttttgcctccaggagctgaacggcttcctggaatttctggtacttcggtccaaagattaccggaatgccatatacggcagcttccaacgtattatggatacccactccgaacccgccgccgatataggcaatctctccatagcgatagatggaggaaagcaggccgaagcagtctattatcaggcaatccgccttacggacattcttttcgtcggcacgggtataacgcacatacggccgcttcagcttacggattatctctaccaaatgattttcgtcgattacatgcggagcgataatcagctttacttccggatgctgattaaagtattcgataaacaaatcctcgtcgggctgccaggaacttccggcaacaaaagtcatcgtattgttcttgaacaactcaaccaaaggcaagtctttagcctcttcccgaatttgaagcacgcggtcaaaacgggtatcccccaccacagtcacccggttgataccaatcttcgccagataacgcttggagcgctcgttctgcacgaagatgtggtcgaagttgcgcagcacattcctatacgtaccgccgtaccatttaaagaaaatctgcccgcggcgaaagatggaagacacgctataaacggggatgcggcgcttatgcaactcatccaagtagttcttccaaaactcatacttgataaaaaacgccatgcagggattcaccaggtcaagaaacttcctcacattgcgcggtttgtcgaaaggcagataacacacgatatccgccccccggtagttcttgcgcacttcatagcccgacggcgaaaagaatgtcagcaaaatacgataatccggatatttggcacgtatcttctcaatcagcgggcgtccctgttcaaactctcccaaagaagcagcgtgaaaccagatataacgcgcatccttctccagctgctgccgaagaagttcgtacactacccagtgccccttcatcatcttccgcggtttacggctgaaaggagccaccagatgcaccgcaatatcatagagtattattgctaaattataaaacatacttttctccgcttcaacttatttcagaacgtcgatggcacgctgtatgcgggcaagcgtctcttctttgcccaacaatgcggtaatatcgaacatgtgcggtcctttacactctcctaccactgccagccggaaagcattcatcacattacccatgtgatatcctttctccgtaatccagccgataactacatcttccgacggtttagaggagaaatctccaatgccccgaagcacttccatcaattccgtcatgatgcgcggagtatcttccgaccaacgtttcttcacatccttctcggcatactgctcaggagcaacaaagaagaaacgtgcctgatcccacagttctttcacgaagttgacgcgaccctttaccagggagactaccgtagtaaggaacgcatcgctgtatgcaccaaggtctacaccgtgctctttcagtaccggcttgaaaagttccgcaagctcctcgtccgatttctgaagaatatattcatggttaaaccagatacctttcttatagtcgaacttagcacccgatttgctgcaatgactcagattgaacagttttacaagttcatccatcgacatcagttcctggtcgttacccgggttccagcccagcaaggcaaggaaattgataacagcttccggcagatagcccgattcgcgatagcccgaagacacttcgcccgacttggggtcgtgccattccagcggaaataccgggaagcccagacggtcgccgtcgcgcttgctgagcttaccgttaccttcgggtttcagcaacagcggcaggtgtgcgaacgccggcatcgtattttcccaaccgaaagcacggtacagcagcacatgcagcggagcggaaggcagccactcttcaccgcggataacgtgggaaacttccatcaaatggtcatccacaatattcgccaggtgataggtaggcagttcgtccgccgatttgtaaagcaccttatcgtcaaggatagacgagtttatcacgacctcgccacgtatcaagtcgttcacatgcacatcttcgtccggctctatcttgaaacggaccacatactgcctgccttcggcaatcagcgcgtccacttcctctttgggcatcgtcagcgaattacgcatctgcatgcgtgtagaagcgtcgtactggaaattggcaatctccgcacgcttggcttccagctcctgcggagtatcgaaagcgatatatgccttgccggcatccagcaacacctgtacatacttcttgtatatgtcgcggcgttcggactgacggtacggaccatgttctccaccaaagctgacaccctcgtcaaaaggaatgcccaaccacttgaaagactccaatatatattcttccgcccccggcacaaaccggttggaatcggtatcctcaatgcggaaaatcaaatctcctccatgctgacgggcaaagagataattatacaacgcagtgcgcacaccaccgatgtgcaacgcccccgtaggactcggggcaaaacggactctgacttttctttctgtcataatctatcttacttataactaaattagacggcaaaattaaacctttttttccatactattgtttttttttgtacttttcgcaaaaatttcaaccgatatgaactatttcaaaggtaaaaacaaagagttctcgttcagagatttgatatacaaggcacttatttttataggtacggtgggagttattgtctatttcctgccgagagacggtaagtttaattaccagtttgacattgacaaaccttggaagtacgggcaactgatggcaaccttcgacttccccatctacaaagacgaccaagtcgtaaaaaaagaacaagacagcatcctggcctctttccaaccctatttccaattggacaagaacaccgggaaagaggcgctcaagaaactgaagaacgactatcagactcatctgcgcgacattctgccctcttccgattacatccgccatatcgaaaaaatactatccgaagtgtaccgggcgggcatcctttccactgaagaacttgcccggctgcacaaagacagcacatctgccgtcatggtgatagacgacaagcttgccaaccaacggagcatcgacaaactctactccgtaaagcaggcatatgcctacctgcttacggccgacaccatacactatcgtccgaacatactccggcagtgttccctcaacgaatatctctctcccaacctcacctacgatgcccggcggacagagaccgccaaggaagaaatcctcgacaactattcatgggcaaacggcatcgtactgagcgggcagaaaatcatcgaccgcggcgagatagtgagccgggagacctacaatatcctcgaaagcctgcgcaaagagtccatccagcgcagcgagtccatcggccagaaacaactgatgctggcagggcagattctgtacgtcggcatcttcatattgtgcttcatgctttatctcgacctcttccgcaaagattattacaaccgcaaaggcaacctcgcgctgcttttcacccttatcatgttctattgtgtggtaacggccgttatggtaacaaacaatatattcaacgtatacatcattccctatgccatgctgcccgtcattatccgcgtgtttctcgactcacggactgcctttctcacacaggtcgtcacaatactgatttgttccatctgcctgcgctatccgcacgagttcatcctgctgcaactaacggcaggtttggttgcgattttcagtttgagagaattatcgcaacgctcgcagttgttccgcacggccatcctggtgattctgacttatgcagccgtttatttcgcttttgaactgataacggaaaacgacctgtccaaactgaacggcagtatgtacacctacttcgtgataaacggcgtattgctgcttttcacgtatccgttgcttttcctggtggaaaagaccttcggcttcacttcaaatgttactttggtggaattatccaacatcaacaacagtttgctgcggcgcatgtcggaaaccgtacccggcacattccagcattccatgcaggtagccaacctcgcagccgaagcagccaaccgcatcggcgcaaacagccagttggtgcgtacaggcgctttataccatgacatcggcaaaatggagaatccggcattctttaccgaaaaccaatcgggcggtgtcaatccgcacaagaatctcggttacgagcagagtgcgcaagtcgtcatcggacatgtaacggacggattgaaactggccgagaagaacaacctgcctaaagtcatcaaggatttcattactactcaccacggtaggggaaagacaaaatacttctacatatcctggaaaaacgagcatcccggcgaggaacccgacaacgagtcattcacctatcccggtcccaaccctttcagcaaggagcaagccatcctgatgatggcggattccgtagaggcagcctcgcgcagcctgcccgaatatacggaagagagcatcagcaacctggtagacaagattatcgattcgcaggtggaggaaggttatttcagggagtgccccgtcacgttcaaggacatagcaacggtaaaagccgttttcaaagaaaaattgaaaaccatctaccacacccgcatcagttacccggaacttaaaaagcaagacctatgaaaatcagtaccaaagaacagcaaagagcggaatttctgttgcaaagccaacggattcaactgcatcagattgaaagtttcagtttcatggaacgatacccccgacaggcgcataagggtgtcccggcaggaaaagccaaatacggtcccggaatattcgtattccacctaaaggaaaagcaggataaggtaatatacatgcctcccttcaggcatccttcatcactcgtccgctttctggtgtcgcaaggagtgccttttgccaattatgttccgcgcggacggagcatggaaaccctcccggaggaaacttaccggcgtccctcactgtatatgttttggttcttcatattattccttatgttcctgatattgggttactattccgtcggcattgatgcatggtggggattcattccggccatcctgtccttcggactgagccttttcttcatttgcatgctgatgacccggttctgctacctgacgctggacaacgagaacctcaccgtacacagtgcaggcaggacaatccgctatccgtatgcagacctgcgcaaggtcaacttcgattttgcccgggagcagactttcacccacgtcatggaattgctcgacaaggactaccgctaccgtcttttctacatcggccgggtttcaaggaagaagctgaatgagattgccgaacggttgcaacaggccggagtggatgcaacgtgcagcctcaacgacaacaagcgtttttatcatgacaacaggcattgagcggtgattattcgccaaccgctccgagcaatccggcacaggcgtcctccaatatatcgagtacgtattcaaacccctcggctccgccataataagggtcgggcacgtaatcggcatgggcaaacttagtacagtattccgtcatgcgatgtatctttccgcatgcttccacagaaggagcacgctctttcaaatcatcaatattacggtcatccattccgataatcaaatcgaactcatagaaatcatccgtacgtaccggacgggaacggtgcgtcaggttgtaaccccgacgggcggcatgggcacgcatcctgctgtcgggcagctctccctgatgataggaaagaatacctgccgagtcgataacgaactcatcttcacgccctgcctcttctatcaaatgcctcatcactccttccgccgaagaagagcggcaaatgttgcccaggcaaacaaacaatatctttttcttctctttcatactcaaactcatattaaacattccgcaacccgcactacggctatctacatcgggtctacatcataatatacaatcagcgacttgaaacggtcttccattatcatctccttctgtacctgcagcaacaattcgcggacacgcgccataggagctttggtttcaatcttcactacaattttgcggataaacagcgtctgcacacgtgccaccggcggtttatccggccctaacacccgattgccgaagatggcacgcagcttgcccgccatagtctgcgccatcaaatcgagcaggacctcattacggttcttcagatacacatatatgaggcgataataagggggataatgaaacatctgcctctcggcaagctgtccgtcgaccatgccttcgtaatcattggcaattacctgagggatgataggatgctcaatgctcttggtctgcaacactaccctgccccttttattcttccgtccggcacgccctgctacctgcgccatcaactggaaagcacgctcataggcacgaaaatccggatagttcagcatcgtatccgcattcagaatgcctaccacgcttacgtggtcgaagtccagccctttggaaaccatttgcgtaccgataagaatatccgtctttccctgttcaaaatcggcgatgatacgctcgtaggccgcgcgtgtgcgggtggtatccaaatccatacgggcaacggtcgcttcgggaaacaagagtttgacgtcgtcctctatcttttccgtaccgaaaccgcggttgcgcaagtccgttccttcgcaagcgggacagatgcggggcagttgataggtatatccgcaatagtggcaggtcagttggttcagtcctttatgataggtcaggctgacatcacagttcttacatttgggaacccacccgcacgtatggcattctatcatcggggcaaaccccctgcggttctgaaacagaatgacctgttctttccgttccagtgcctcgcggacatattgcagcaacaaaggggaaaagggcccgttcatccgcttcttgcgctgcaactccttgatgtctaccggaataatctccggcaactgtatctccttgtacctctccttcagctccaccagcccgtactttccggacatggcgttgtgccaggtttctatggaaggagtcgccgtgcccagcagggtcttggcgccatacagcgcagccagcacagtggcggcattacgtgcatggtagcggggggcggggtcctgttgcttatatgtgttttcgtgctcctcgtccacgataaccaggcccagcttgcggaagggcaggaacacggaagaacgcactcccagaatgatgtcatatccgctgtccgaaagctgtttctgccagatttccacccgttcggcatccggaaacttggagtgatagatgcccagacgcgaaccgaacacccgttgcagcctttctgtaatctgtgtagtcagcgctatttccggcaacagatacagcacctgcttcccttgccggataactttttctatcagatggatgtaaatctccgtctttccgctggacgtgactccatgcagcaaacagacattctttgtccggaaactttccacaatgctgtcgtatgcccgctgctgatgcccgttcaaaggatttaaagggagggttgtccgggcagcggctgcattcagcctgcctatttcctgctggtatacctcaaagaccccgcgttccaccaacccgttgaacacggcaggcgtagcggaagtccgctgcaaaagttccttcttggtgacttctttcggcgttttgcccaaacaggcggaaagttcgatgtacttcatcagcaagtccaactgtttgggagcgcggcgctgcagttcgtcaaagaagaaatgcagacggtgttcattgcctgccgcttccgtcaggcgtacgcgggtctcggtcttgggcttgtaggtgcgcttcagttcttctttcacaaagaccgcctctttatccagcaaggatttaattacggacaggatattcctgatgccgctctccttctccagtttcgtaatgcactgctccggctccgcggcaagcaggttcagtatcttctgttccttttcgggcagttgcacatccgattcgaaatcggggttatactccacgatggtctcgctctccagcttcaggcctgaaggaagcgccgctttatagacatcgccccgggtacagagataataatccgccagccagtcccaaaacctgaactgctcgggtagcaggatgggatgcgcatccaacagggcactcacttcctttacctcgtacccggccggtgcggaatagtgtatgttctgcacaatagccgtatagtatttcttccgtccgaaaggaacgaccacccggcagccaatctgtacactccccgccatatcctccggcagcgagtatgtaaagcaggcatgcaggggaaggggcaatatgacatctacgaacttttccattgcaacggcaaagataacgtaaaaaaacggcgttgccaatcaaaatcggcaacgccatacagagataatcccgttatatctttagaacaggtaagcagcggaaatctgccaggtcttattctttgttccgatagcctcactggcactcttccaggtgaacgagtcgccgcaaggaatcgtatagttgaaacctatctgcaaatgccgaaccagtttcacaccggctcccacattgatacccacctgcgctttcttgctttccagctttcttccatcttcaaaattcttatcacccttgaagttgaagaagaagtccggaccggccgctacataaatacccagcatactgcccagaccgatggaatatttcagattgacaggtatgtccagccccgattgcttcatatcaaggccttccatcttatcgcctttctgagaatacagcaacgcaccgtccactcccagtcctataacgggaatcgttatttccgccataggtccgaaaaagaatccggtagagttgtctttcattccttcgaacttgagtttcgacaagttcacaccgcctttcacaccaaacttaatcaactgagcttgggcaggcatagccaatgccatgcagcatacagctatcataaaaacactaaagaactttttcataattcaatacgtttaaatttcgtggacaaatatatgcaaattatcccttaaaaaaacaacaggcattccgaattgttcaaaattaaaacaagagttccggtgcgtcaccggtggaaaaccgtcccaatctccagcccggaacattccgtatgccggtgtttttccacgacatcccttatgtataaaggagaaataccctatgcaaaaacctgctatgccacatcgttttcctcgtcctgcaactgcgggctgtatggcccgcatatggaaaccgtacggcccgcaaccggcaaccggagagcccgcaattggaaaacgaggttttacatccggctttcctacattatacatgctgtaaaacgacaaaaccaacgggcaacggtgccattaagccgcagagtttggaacgctccgcccttgaaaaacagaggcttttaaccgcagttaacaaatttcacttcacataggttttacatctgtgtataagcctgttacaataaaaaagaaggataaaagtgacgaccggaagtgacgacaaacaattggtcaacactctcgtcaccgttgtcaacaccctctccatcccccttctgcaaagggatagaacgctaccggtgacgagtgacgagaaaaaacgtattttcttttttaggagattaaaaatgcaagataggcatcggaaagcatagattgactacctttgcaaaacattattcaaaaaaaacaatttctttattacggagtatgatagaaatcaggaaaacagagattgcagaactcggcatccttatggagctttttgaacagggaaagcgcatcatgcgcaaaagcggaaacatgaagcagtggaccggcggctatcccaatgaagaacttgtaaagaaggacatcgagaacggaaacagctacgtatgcctcgatgaagaacagaacatagtagggaccttcactttcatacaagggaacgaccctacttacgcccgaatttacgaaggagcatggagtgacgacacgcgtccctacggcgtcatccaccgcctggcaagcacggaacaaagcaaaggagtggcatccgcctgcctgcaatggtgctaccgccagattcccaacctacgggcagacacgcaccgcgacaaccatatcctgcaacatatcctcaaaaaacacggcttccaatattgcggcatcatatacctgcagaatggagacgaacggctggcctttcagaagctgtagcgacggcacacgcaccaaactcatacgggccggctgccgccatacttcttcttcagctcctccacggttgttccggtgaaatactcttccacgaaatcccaacgctggccgtcggtcagagtatccgtaccgaagaaaaaggagaacagctcaatctgctcctcgaagatacgttcgttcgtgtccagtataagattatgatattcgtcggaatccgccaactgttgcagaagttccgggttatcgaaccgtacatgcacgcaaggcgtaccgcctccctcaacgctgaacgacaggcagtcgagcatggaaagaaggttgagcaacatattcaaatcggagaacggagtgcaatagaactgcaagcggtcgcccctgttgcctgcgatacgctgggcgaacagcttctgataacgggacagaagcaggtcgaaacctttggtgacggtaaacgagagttcgttcgagtctttcttcttgacgctgctgatgtaacttacgctgcgcccctcctcggtgcggctttccagcaacgaaccgatgaaacgtttggccgacggcacatccatgccgtgctcggcaaacaccgcacgcaactcctcctcgtcgaaacggcctttcgacttcagcaaagctgttttcagcatcaataccaggctcttgaacaaagcatccatgcgctggcggataaccgttgcatcctctttcagcaacacctcgtgcttgcccaccgaaacagcacgtgaaccttcccacaacatgccgctgttcagtttctgcttgaactccctgtatcccaactccggaaaacgctcttcccaaagagtgtccaaacgggcacggtagactccctcttcaccgtccaccccggtaagataggcctgaaattcgcgtgcaaaggcatcgcccgtcttgtcctggatgtaaccctccgtcaacagattttgcggacttacctccagcagacgtgtgccgtagcgttgctccaaatcatcctccagccacagcagggccgttttgataagctgccccaactcggcctcgtactccagcttattcttggtacgcggcaacttcaccacgaactcaaagtcggacagggaaacaagtatctcttccttcttccctttcatccgatatacctccatgagtttcttcaggataagttccagttggtcctgcccgatgttgccggtctggtgcagacgcttcatgtaataaaagtcgcgttcgtgataatcggtggcggcaataccctgcacatccgcatcacgggcggcacggcctatttcctgaatgtaatcgacaaacgtgctggaaggcgccacgtggtaaacacggtcgatgtcgctgatgtccactcccatgccgaaagcttttgtagcaacaatcatccgcttcgtgccctctttaaagtccctgacgatggcagccttctgcgccttgtccttcttaccgtagtaagaggccaccagacgccagtcggcaggagccacccaggtcttgatacgcatatctatgccaccggcaaaaggatagtaaagcagcgccttatgcccgtcgagaaactcctctacacgcccggatatgacgcgttgcttgcctttgtcataagtctccccctcttccaatgtgagccggcggatgtcaaaaccgatgttcttgcgtctgaccgtacctacataaagtatgcagggttccatttgcagggagcggatggtatcgaataccatatcgttgccgcctttagggttccacacggcagtggcggtaagggcaaacagagggaacgaataaccgaggttctgcttcaatgcgcccaaataacgccccagaaaccaatagtccacgcggaactctttgccccaggtggttaccgtatgcgcctcatcgacaacaaccataccgatgcggcggttgccgataaaatgtctgatgtcgtaggagagcaacagctccggtgaaagatagaacaagtcgatttccccctcacgcaccgcccggtacacttccatcttctgctccggcgaaaggtcggaagacgcatatgccacacgttcataccctacgtcctgcaagccttccacctggtccacaatcagcgctttcaaaggagagacaacgatagtcagcaggttatattcttttcccagatagatggcgggaagctggaacaagagagactttcccgcaccggtcggagcagtcagcagaatattgtcgggctgttcgccgcctttgtacgccttttccgcttcccggattacattttcaaccagttgtccctgagagatacagagagtatccctgtttttaaacaaatcatcgtaaatctcgagattgcggaacccgtcgtaaccataggtctctttcagcagttccgttacactttgccggcactccccgggcaagtggcgttctttcaatacgggcaagcggtgtgcctctcctgtttgtgtcatcattaatataatgggggattaaaaagaaaaaaagatagtattccggccatagtaaaggccttcgtactacctctttctataatttgtatatccgtaagccgacggatgaaattcaatcaaagcgcatcaatactcctcttcgttgaagaagaaatcttctttgctgggataatcaggccaaatatcttcaatactttcataaatctcgccttcatcttccatttcctgcaggttctcaataacctcaagcggagcacccgaacgcatggcataatcaatcaattcgtccttagttgccggccaaggggcatcttccagtttagatgccaattccaatgtccaatacatagtttctaagtattaaaattgtgagtagtaattcctttctttatttttcggcaaaagtataacaaaatatttcacttgcaactattattccaaaatatttcttcttttttctcgtcttggttcattttacgcgaaagaacgaacaaatagtcagatagacggtttacataggccaacagctcggaagagatgtccgtctgttccgccaaagcaagaatgcgacgttcggtacggcggcaaacggtacggcagatatgacaaacggaggctccgcgactcccgcccggaagaataaaagcagagagagggggaagcttgtcgtccagccggtctatctcgcgctctatcgcctccacctgttccggggtgatgatactcgcctccttcagccgtgtcttttcacgatccgtagcaaggtaagaacctattgcaaacaatctgtcctggacttgctgcaggaactgcctgtcgggctcgtcggaaaggaaagttatcagaaaccccagattggaattcagttcgtccaccgtaccgtaggcttcgaggcggatgtgggttttaggaacacgcgtgcctcctacaagggaagtggttcctttatctccggtctttgtatatacaaggcttttcttcataatggtcttttttcctttgaaacgcctaaaggtaatcaaaagttgacaatatagtcttgttttatcctggttttatcaaagaaaataataccgagatcgtaaaggtcgaaagtgatgcctgccttttcgtgccggctgatacgcctccaaacggcacgcatccgggaagtataacggataccttcgattacaaagacggacgtttgcgcagtgcggtcggcacagatacggaacacctcttccacaaactccggacggcggtaatcgtgcaggtataaaaagtcgacagacgcgccactctccaaaaacagttcggacaggtcggcggcagcagtgtagtccgccccttccttcgcagctttcagatataaggaagaggcagcctgcatgcctacatccacaatcgtagccggctgtgcataatttaccagccggaacagaagccgtttcacctttaaggactcgtacccccatgcccggtctttctgcggcataagcctcttctgctcggaagccagctccttatacttataataaggagtagtttcatagataacgtgcgttatcaggttgaaggcaaaaggcgagtgcaccccgtaaccgcagcggtggcggaatcggtacagccagataaaagggcgctttagcgcaagtaacatacggttcatcacaagttaattctttattgtgttgcaaaaatacggaaaaacctgaaacggaagctaaccgcacagctttcctttgataaccgttcccccgccggacgaataattttcccgaaatgtaccgtatccgggaaccattcccactgcagaatgttctctatggaaataacccaaaacccaacggataatgaaaaaatcgatactgttaatgggccttgcagctctcatagcaagctgttcggacgatgaccggaacaacgatacggataatcagcatcttgtcagtccctcaatggctgtgagcatcagcaacaccgacggccgccaaagcccgtttaccggcattcttacaattatgccatgcgatgcaaacagctccatatactatggaaattatgtaaaaggaaaactgtctcctttctacggctattaccgggtaaaggacggaagtttccatgacaattccatcaatagggagatttctctgccgataggcacttacaatatgatttattggggaacaccccaataccagactcccatttatgcccaccctgccataaaagaggcggctcacagcataggagccgatatgtccaaacagtctctcggcttgttcagaatatcagccgataccatttactatcccgtattcgatctggtgtacgccacacaaccggtaaacatcggaagcgaaagcctcagaggctctttaaaacgagtggtagccggaataaaggttgtcctgaaagacaaagacaatgccgtactaagttccagtatagacagtgtggccgtacgcatcaccaacatttacagcgaactcaattattatacgggaaaaccgcaaggtacaccacgtacaatcgcgttccctctgattcgttcaaacgatggtactcagatgagcaacagcaccgttatgctgttcccgtccgccggaaaaccggaattccaactggcaatcattcttaaaaacggtaatgtgaaaagcttcagacaagcattgagcagcccgcttgatgccaatgccaaactgacattaacgttaagtctgggtgatattttctctgaagaatcctccggtgactttaccgtcgatgactggaacgagaaaaacgagaatattgatataccgataatagagtagccgaatattataaagagtctttccgtacggaacagagctgccggtgttaccatgaaataaccctttgccgttccgattcttaataacaatgctattctatatattcattctagggcaagctctcgaacttttttctgtgctccattattgattgcatattattttgcgcccattcagttaacgatataatgatagggacaaggcttttgcctgttgctgtcaactcatactccactcttatcggaacttccggaaaaacggttcgttttaccagtccgtcagcttccaatatctgtagcgtattagacaatactttagttgatatatcaggaatttgcctcgctaattggttgaaacggattgaaccattctcattcagaatgaaaacaactaacaatgcccacttattaccaaaacgtgcaacgacattccgaatagggcaaatctcaatgatagattttttttcttcttttttcgtcatgacaatctattgtttttctgcataagtaacctccgggtaactttgatacatatttgtaacttcttgtattgcaaataattgattcatatatttgcagtatcaaaaagaaagcaattatccaatgcaaagttagttaatttgcgatacgtaatcaatagaagtataaacatcaaaattaaaagctatgaaacagattgaaaaaacagcatcagcgacaaacttcaccgctatcaacttaggcaagttaaatgaattaggagattacttgttggaacttgctcctgaaataaaaattccgggaaaagtgtttggcggggctgcacttcaagccacaggaagcgaattttcattccagttattccaaccgggaacagaaaccggttttcttcatactcacaaaacgcatgaagaactttatttcttccttagtggaaacggagaatttcaagtagacggccaagtattccctgtttcggaaggaagtgtggtacgtgtagcccctaaaggtaaaaggtctgtccggaacaacggcataattccccttattatgctttgcattcaatataaggctgcaacattcgcacaagaagatacaacagacggaaatatattaaacgaaccggtaagatggtaacattatgaaacaggactagacccgaatatttttgtgcaaaagtataaaatccagttgcccagtgaggaagaaatcacaagatttctttcaaaggagacaggctaacaactttcaataaaaacaaaggtttagttcattttagatatacaagagaaatggactaaacttaatcattgacaaatagcgagaaggcttgcacctaaccgatgcaagccttctcgctatttgtcattttccgataagtcaccaagtaaatgtgtacttcttctcatccccctcgtcttttataagcagttgcgtaggataaccgtcggaattcagtgtccacttataattcgataattcaacagaagtatcatcagcatcacgcatcgcaagcggcagatgcttggtagccttgccaagcatacctccgtagtaggcatatatcatctcatccatatccacatccagcagttcgtcgaacatcatcaggcaacccttgttatcaatgggagttgcaatctcgcccgtcgtatagtctatgatagcaccgtcctcccactcgtcattgccgtcaagaactccgtcgccattcatatctccaccacccatatagcttgtggaagtcttcacagcatcaccatctttataagtgattttcgtcaactcaccgctaccttcagaacgtctcatttctatgagatgaccgtcggcatcgtacttcatctcccaagtgaactcactggcatcggaagtgccggcgtggtctatggagttgcaatattccacatagccattgctgttgagctgcaagttcagttcggtaacatcgccctcgtcatctgtcacggtgatttttgcgcggtctttcgtcgcatctgccttcgtttcggcaaagaaatactcgaagacggctttttccccatcctcacctatgatacttgtcaccagtccttctttgttttgggagatagacatcccggcagccgacttcggtagtccccccttgaatacctccgacggcttgaccacagtgacagtgcttccgccaccctcaccattttcattttcgtcatcgtcactacaagcagtaaatcccagacacaacgctgcactcagcatggaagcagcaagcattctaaacattttcataagtcgcaaatcttcttatagacttcccggattcaataaaattaatacatcaaaaggcatagaagtctgtactttccgcttatcctgtcgctcaaacttctacacagccccctaaacaacaggaaacggcgtttcataaatggggtcaatgtaaaaacctgaggggtaaatttataaattgttatctttgtctccaaattcatagcttatggaattaaacggttatcgccttcttcttcctgaaggcactttagattactttgatcttgttgatgtgaaggaaagcgtaaatgaagttgtgatctaccttgaggagaaaaatatcgttcctgagaagtatacagatcaggatactgagagtaaaggcttttatgctcctgttattgttcaggattttcctcttcgtggcaagaaggtcttccttaatattcgtcgtcgtcgctggctcttaaagaagcataatgagtatatctcccgtaactggcgtatggtggctgaaggtactcgtatgacgcaggattttgcgtcttttttaaaagaactgtattgataactatccgatcagttgcaagctcttaggtgttttatatggagttgacggggatttattggagcgtcaataccgtaaccatctaagtggttatctccattgggaccaacttgttcatgcagaggattggctactattcgaaaagaatatcggtgcttatatctgtattgatgaggtagccctctcgcgtggggaactctatactgtactgaccaataaagaagctcacggtggtaaaggtagtatgattgccatcattaaaggtacggacgttcatacggtcacttctgtcctgcttaagctctcccgtcgccgccgttaccaagtgcgcgagataaccttggatatggctcctaacatggagcagattgcacgcatctgctttcctgcggccaaacgtgttaccgatcgctttcacgtacagaagttagcttatgaatctgtgcaggagatgcgtgtaaaagctcgctgggaggctttggatgaagagtccactcagattgcttatgcaaaggcctgtggaaagatgtatcatgcacctgttttcgctaatggagatacaagaaagcagttgttagcgagaagtatttatctgctttacaagaaggaatccttatggactcagtctcaaagaatacgggctgaaattcttttcaaggaatatcccgatataaagaaaggatattatctgtctatgcggttaggcttaatctatcatcagtgtaagtttaaggatattgctttgacaaggctggcaaggtggtatgatgaagtagataaatcagggttcctcacctttggaagggtcgcacgttctatacaaacacattatctggatataatcaatttctttgaaaggagggcaaccaatgccgcagcagagtcattcaatgctaaaatcaaagcatttagagcacagttcagaggagtaagagatagagcttttttcttatatagacttgctaaattatatgcttaaatataaaatccctcagattgttacgttgatcccataaatgccttctttcaaataataaatttgaggaaaaagtaataaaaggatacaaattataaaaaaaaacaaaagcaaatcgaacaaacaaatcaaataactactatgaaatacccaatcttacattttggagtataaaattgggaatcatttctataaatcattaattttcaatatttgttgcagagagacgggcttccatacctctaaaacataaaactgaactgtttcttctgcgaagctttaaaactttcaatctccaaagaaagcgatttcttcaactgtcctgacataaagtccaggaaaggcagattggtttcttcatcctgacactgacgaagggaaaggatatattcttccctatcctctttgaatatcttggtggggaaaaggtgatagcaaaattggaggtagttcattagcagccgagccgttctgccgttaccatccacccatggatgtatggttacaaaattaaggtgggcattgaagctcaattcatattgttcccgaaatgttcccacgctcttttgcttctcttgcaaaatggtgcaaagctcatccaccttagcaggaatcttcagatagttcatataagaatgtccaccaatgccagccgtaaccctacacaggcgaaactctcctttggaagaatcaaaagaaccacccatcacactatgaatgcagccagtagtacgcatcagcatagcattcaaccttttcagaaaagcaggagttatcggtacaagacggtcggattcagctttagcaaattcgtacgcttgctttaagtcttcattcatcagatgatgtacaagcggttttcctttcgctgtcactccctcgtcaaagagaagctgcgtgtcaagttcggtcaacgtagagccttctatggctgtggaatgggtaataagagaataaaggtagtacttatcatagtccaccgattcactgataccaagtttttgaaacttctggtacaactgttctatctcttgccaaacaccttgttccataccacttatttaataggctttatttcttctcaaaggtaacttatttactacgttcaaccaaaggaaataatgatttactgctatattttttgcacgtatggggaaaatgtggggaaaattccataaaaagaaaaaactaagtaactgatttctcaatacttagcttttatcttagtacccagacccggggtcgaaccgggatggaagtgaatccactggtgtttgagaccagcgcgtctaccgattccgccatctgggcatgttgatttctcaaatgcggtgcaaagatacagctttttttgaaaactacaatactttccttaaaaaaaggcgaaaaaaacgagaaaatattctccaagcattccgcgtttataaaatatacagtactttagcagaaacttttaaaacatttaatatgataaccaataaggataatttctgtgtaatcatgggtggcggtatcggtagccgtttctggcctttcagccgcaaaactcttccgaaacaatttctggattttttcggcacagggcgttcattattgcaacaaacattcgatcggttcaagcaagtaatccctacagaaaacatactggttgtaaccaatgacctatatgccgacttggtgaaagaacagcttcccgaattaaactccgaacagattttattagaacctacacgcagaaacactgccccgtgcattgcatgggctgcttaccatatccgtgcattaaacccaaatgccaatatcgtagtagctccttcggatcatcttatcctaaaagaaagcgaatttctttcagccatagagaaagggctggcattcgttgcaaaatctgataagcttctaactcttggcattaagcctaaccgcccggaaacaggatatggttatatacaggtagccgaacatatagacagcagcttctataaagtaaaaacctttacagaaaagcccgaattggaattagccaaagtctttatagaaagcggagaattttattggaatgccggtctcttcatgtggaatgtaaacagtatcatcaaagccggtgaattacttttaccggaattggccactaaattggcagccggaaaagatgtgtacggaacaccggaagaaaagaaattcatagatgagaactttcctgcatgccctaacgtatccatcgacttcggcattatggaaaaagcagacaatgtatatgtatcattgggcgacttcggatggtctgatttaggtacatggggctccctgtacgatctttctcaaaaagacgaatcggagaatgtcactctgaaatgcaggtcgttattatacaatagtaaaaacaatattgtcgtacttccgcaaaacaaacttgctgtcatcgacgggctggaaggatacctcattgccgaatccgacaatgtcctgctgatttgtaaaaaagatgaagagcattccatacgtaagtatgtgaatgatgctcaaattaaattgggagaggactatatataaatagttttttcaacgacaaaaaagtaaaaaaaatcggcagttgctatttccaactgccgatttttttttataatgggaggaaataaaatcttttagaacgccatggtgatagctttggctatcgccttaaattcttcatctgtcaatttcagctttgggttggaaaaaagcatatccttttcattctgcataggaatcaaatgaatatgtgcatgaggaacttccaaacctaaaactgcttcacccactttcctacaaggaaaagccttgccaatagccaatgccactttctttgcaaaaacatgcattgcagccaaatcctcatcacttaaatcgaagatatagtccacttcctgtttaggaatgaccagcgtatgccctttcgccaatggattaatatcaagaaaagcaaagaacttatcattctccgccactttgtagcaaggtatttcacccgcaataattttgctgaatattgttgccataattttacttatataaaatgaggcaagcccgcatgcagacctgcccctcctctaaaatgatatgttcactacttccagattgatgataccctgcggtactttaatctcagcaacatcacccactttcttgccaagcaaaccttgtgcaatcggagtatttacagaaatctttccctctttcaggttagcttcactttcagaaacaatagtataagtcatcttcataccgtttttcacatttttcagttccactttattcaatatctgtacactgtcggttttcaatttagattcatcaataatctttgcatccgcaataacctgtttcagtttattgattttcatttcaagaagaccttgagcttcttttgcagcatcatattctgcattttccgacaagtcacctttatcgcgtgcctcagcaatagctgccacaatcttcgggcgttctatcgtttccaactgtttcaaatcggccaacaacttattgtagccttcttctgacatataagccatagtttttcctccttattatttataatgttttttaatggtactataaacaaaaaagaattccaacatggtcagcatgctggaaccctcttcctattttttcctttgcaaagatagacttttaaataatgcgtgtcaagcaaaaagcagtgctttgtaacatatttaaatgaaatcttctaatttataacatgttacagcaaagttttcaccgccgcatccaaatctttaattgtttcgccacgggcactcaactcgctctttttattgattaggaagacagcaggaagcgactgtacattataagcggcagctatgctggaatataccccattggcgtcacgtacacatatccacggcagattatcggctgttgttttccaatagtgctcatcagcatccaaagaaacctggtaaatctccaagccctgaccggcatacttgtcgtataaatcacgcagcatataattatgtgtaggagaaaccgcactctgatagattgtgaaatccaaaataacagctttccccttcaaatcactcaacttgtgcatattgcctttcatgtcgcgcaagttaatatcaatgatacctgtttccgacacagcctccgtaggaagttccacgaccttctgctgcggggcacgggtattcttcattccctttattactatattataaagattcttcgaacggtcagcatgcggataataattgttcaggctggttgccactgcagcaaagcacttcacatcatctttattattcaacggatcgaatatgagataattatttaatttctgaaataaagcaaaataagcagctgccgtattaggagcggcaaaaatataattaatcttcacttcatccttatagtccttcatcagtgtagccaaactatcctcaaacacatccgtaccgattttatgggcttgcatactttgaatcaacgcatttacattggtttgaagttgcatttgcttcaatgtaagttcttttatcttcacactgtttgccgaaccttctactgtataagccgtagaaaaatccgtatacggtgcattaaaccgaaccgtttccgcagaatctatggaaaagttgataaccttatcatctacacgcaaacgataaaattcaggtgatacagggcatgcctgcttaaaagcaaacgtaccgtcactcttcaacttaacggagtccaaaggaacaataccctctaaagccgaagcttccaggtaaagcattttaccgtcagcaccggatatttcaccttccactttaaattccggtccggaattacatgcgcttaaccccaaaacagccaatgctacaaaaagaatctttttcatatttcatgtatttttctaaaaagaacgtgcaaatatactccttttcacggttagtcaaagcattttcccacttcttacacttataaaagtgcaaaaaacaactaaatacaaactttttatctcattcccaccgtattacacgaataaaatatgtatctttgcaagcattttgaaagaaaaatagatataaaacattttttatgattaacccaattgttaagacgatcgagcttcctgatggcagaaccatcacgctcgaaacgggaaagctggcaaaacaggcagacggttctgtaatgcttcgtatgggtaacaccatgctgttagctactgtttgtgccgccaaggacgcagttcccggaacagatttcatgccgttacaggtagagtacaaagaaaaattctccgcattcggacgtttccccggaggttttacaaaacgcgaaggccgtgcttctgattatgaaattcttacctgccgcctcgtagaccgtgctctccgccctttattccccgacaatttccacgcagaggtatatgtaaacatcatcctcttctcagcagacggcgttgacatgccggacgcactggcaggacttgcagcttctgccgccctcgctgtttcagatattcctttcaacggaccgatttccgaagtacgcgtagcacgtatcaacggcgaatttgttatcaatcctacttttgagcaattggaaaaggctgacatggatctgatggtaggcgccacttatgaaaacatcatgatggtggaaggtgaaatggatgaagtttccgaaagagacttgctggaagccatgaaagctgctcacgaagcaatcaagatacaatgtaaggcccagatggaactggcagaagaagtcggttctaccgtaaaacgcgaatactgccacgaagtaaacgatgaagaactccgcaaggctgttcacgacgcctgctatgacaaggcttatgcaattgcagcttccggtaacaagaataagcatgagcgtatggatgctttcgatgccatccgcgaagaattcaaggcacaattcagcgaagaagaactggaagaaaaagctccgcttatcgaccgctactaccacgatgttgaaaaagaagccatgcgtcgttccatcctggatgaaggcaagcgtctcgacggacgtaagactaccgaaatccgtcctatctggtgcgaaatcggttatctgcccggtcctcacggctccgctatcttcacacgtggtgaaacccagtctctgtctaccgttactttaggtacaaaactggacgaaaaaattatcgacgacgttctggaacatggaaaagaacgtttcttactgcactacaacttcccgccgttctctacgggtgaagccaaagcacaacgtggtgtaggtcgtcgcgaaatcggtcacggacaccttgcatggcgtgctttgaaaggacaaatccctgccgattatccgtatgtagtacgtgtagtatccgatattctcgaatcaaacggttcatcttccatggctaccgtatgtgccggtacgctggcgctgatggatgccggtgtaaaaatcaagaagcccgtatccggtattgcaatgggattgattaagaatgcaggcgaagaaaaatacgcagtattgtccgacatcctcggtgatgaggaccacctcggcgatatggacttcaaggtaaccggtacaaaggacggtatcactgctacccagatggatatcaaagtagacggtctgtcttatgaaatccttgaaaaagcattgttacaggctaaagaaggccgcgaatacattctgagtaaaatcaccgaatgtatcgctgaaccgcatgccgacctgaaaccgcatgctccacgcatcgaaaccatgactattcctaaagaattcatcggtgcagtaatcggcccgggcggaaagattatccagggtatgcaggaagaaaccggtgcaacaatcactatcgaggaaatagacaatatcggtagaattgaaattgccggaaccaacaagaagtccatcgacgatgcaatgcgtatcatcaaaggtatcgtggcagtaccggaagtaggtgaagtctacaaaggtaaagtacgttctatcatgccttacggtgcattcgttgaattcttaccgggcaaagacggtttgctccatatttctgaaatcgactggaagcgtctggaaacagtagaagaagccggaatcaaggaaggtgacgagattgatgtgaagttgcttgacattgatcctaagaccggtaagttcaaactgtctcgcaaagtattgcttccgaaaccggaaagacaggaaagaccggaaaagaaagacaaataatccctatcaataaataggatatatgagcccgacagtgatctgccgggctttttttcactccccacccatggaaatcaaaaaaacaacaggtattgtttgcatattacaaaaagattatgttgctttgtgatacgaaaccttaaatcgtacgaaaaaactccaatttgaatgtccgactccattaaattacatacgatggaccttttctcgcgttttttccaggagaaccaagaaaagttcctgacttttgcttattcctacctcagagataaagcggaagcggaagacgtgctaatggaatccatgattgccctatgggaaaaccggaaccgttgggaagaaggaagcaatctgcatgccttgctgttgaccataatcaaaaacaaatcactcaatctgttagagcacaaaaaaatacgcctgcaagcagaagaaaatataaacagccataaccagcgggagctcaacttgcgtatatccaccttaaaagcctgcgaacccgagcagatattcgacaacgaaatacagcacatcgttcacaaggccttagagcaaatgccacaacaaagccggactattttcatgctgagccgttaccagaatctccccaacaaacaaattgccgagcaactgcatgtttcactgaaaaccgtagaagcgcatatcaccaaagccctccgcatactgcgattggagttgaaagattacctggcttccatacttctctgagcaataaaagtattttttcagaaaaaagtttccttttttgatagggttgtccacacttcgccggttatatatacagaaaggcggtaaagtccctctctttaaccaagcaactctatttatgatgaaccaggaattactatacaaatattttaaaggaacagcatccattgaagaagagaaacagattctggactgggttgaagcttctgaagaaaaccgggaagcctacctgaaagagcgtatgctgttcgacgtatccctgttttccacaaaacaagacaataagaagaaaacaatacgactcatgccaatgctctgctgggcggcgcgtattgcagcggcagtcatcattgccgtatcaggttactacatgaccacaaattatatatataataaggatgcacagcctcaaaccattactgttcctgccgggcaacgcgcccaaattactcttgccgacggtacacgcgtatggctcaatgcccaatccacgcttacatatgcttccgacttcggtcgcaatgaccgcaacgtcgagttagacggcgaagcatattttgaagttgccaaaaacaaaaaattaccgttctatgtacatacggaaatgcacaaggtaagagtggtcggaaccagctttaacgtctgcgcatacaaaggcagcaaagagttcgaaacaacattggtggagggtatcgtagacatctacccaagctgtaacaaccaagtgattacccgccttcaaaaggatgagttttttgccaattatgacggacgctgcaagaaaaccatcctcccctcgtacgaatatctccgctggaaagagggattatactgttttgatgatgtacccttcagcggcatcctggacaagcttgaaaaatactacaacgtaaagataaccgtcaccagccccagactactgacccacgaaggcctgaccggcaaattcagggaacaggatggcatagagcacatcttgagagccatctccaaagagcatccgttcaagttccgcatcaatgaaaacaaagattcaataatcatatatgaataaacaaaacctttaaatttagtactaaccccttaaaaccgaacagcatgaaaccataaagcaacagtcctaagaattacttcccttttttatacaaaaaagatcggaaagtacccccatactttccgatccgaaacagtcaaaaatcgaccttaatcaatttattaacttaacacagtgacaaagatatgagaaaaatttctttgaatggacttttttgtccaaaaagttttgaaaacaagcaattattgcgtactatgaagaccacactattccttcttctgtttgtaacattccaagcatactgcgggaatagctactctcagaacgccaaagtaagtatccccgattctcagctgagagtagggcaaatactttcccaaattgaatcccagacagactatctgtttgtatacaacaaaaagagtgtcgatgtacggcgcactgttaatgtagatgcgaaaaacaaagccgtagccgaacttctggatgaaatatttgccggaacaaacatcagatatgtaatggaaggcaaaaatatagttctgaccaaaagaggtgaaagcatcgaaaacgtagccggaacacaacaggaaagagtcactgtaaagggtgtcgttaccgattccaagggcgaaccgattatcggtgcaaatgtattggaaaagggtacgaccaacggcatcatcaccaacctggacggagagttcaccctcaacgcacctgccaatgccactttagtcatttcctacataggctatgaacctataaacgttacgctcaacggccgtacatcgctaaaaatccaaatgaaagaagaagcgctggcattggaaaccgttgtcgtaacagctatgggcatcaagaaaaaagaggcctctctcacctactctacccaacaggtgggcggcgatgaactgacccgcgccaaagaccctaatatgattaacgcccttgccggtaagacagcaggcgtatccatcacccgtaactcctccggtctgggcggctcagccaaagtatccatccgcggtatccgttctgccaatgccgatggaaacaaccaaccgttatatgttatcgacggtgtgcctatgctgaacaacgtagccgagcaggcattctccgccatgggcggtaacaacgatgccggcaaccgtgactcgggcgacggtatctccaacttgaatccggacgacattgaaagcatgagcatactgaaaggtgcttccgcagcagccctctacggctcacaggctgccaacggcgtaatcctgattaccaccaagaagggtaaagccggcatgcaacgtatcgtattcaactccaacctgaccatagaccatgccatttgcctgcccgaattccaagacaaatacggcgcaagcggagctacaagctggggtacggttccggaaaatgcaaactccacacccatcaaagcttacgataacgtaggcgactatttcagcaacggagttactgcaaccaattcactatccatcatgacgggtaaagagaaaatgcagacctacttctcttatgccaacaccaccgccaaaggtattgtcgatgtaaacaaactgcaaaagcataatatcaccttccgtgaaacagcctctttgttcaacgaccgcctcacattggatgccaatgtaaacctgatgacccagaaaatcaagaaccgccctacttccggcggctactacatgaacccgctggtaggtttgtacatcttcccgcgcggtgaagacctcagtatctatcgcgataataacggattcgaaaaatacgatgaaaacagatctatgccattgcagaactggtatacggacatcagcggattcaaccagaacccctattggctgacgaacagagttaccagcaacgacaagcgtttccgtaccttagcttccttaagcgcgaacttgaagataagcgactggttcagcgttcaggcacgcggtaatgtagactatatcaatgacaattacgagcagaaaatgtatgccgggacaacggccgatgtagctcaccagaacggccgctatatcaaaatgaaccgtcaggacttcatggtttacggtgattttatggccatgttcaacaaaacatggaacgactggagtttgaatgcagccataggcagcagtatcaataccaccaaagtcaactccttaagtctcgactccggtaaatccggcttgtacaaggctaatgtgttcacagttcccaatatgaatctcagcggtgcaggcacttcatacattgatgaaacagccaaccaaagacgtaccatccagtctgtgttcgcaaccgcacagctcggttggaaagagagtatctatctggatgtaaccgcacgcaacgactggtcttccacacttgccaacaccaaaagcgaagactccggctttttctatccgtcggtaggtctctcatggattctcaacaaaactctcaacctgcccgaatggataagcttcggcaaggttcgtgcttcctgggcacaagtcggcaacgaccttcccatcggcatcaccagcccggcgcagaccatcacggcaggcggcgtagtgaaacccatcgactactactttgcagaagatttgaaaccggaaatcagcaactccatcgaagtaggtactgagtggaagttcttcaacagccgtctggatttcgacttcacattctaccgcacggataccaaaaaccaactgatccgcgtaaacactaccgccgaacaacgtccttaccgttggataaacgcaggtaagatacgcaatacgggtgttgaaatcaccttaggcgctacgccgctgatgaacgataatttccgctggaaaacccagttcaactttgctaccaacaagaacaagattgtatccttgggcggcacacccaacttccaatacgcttcgggcaatgtaagcatgccctataaaatgatggttgtagaaggcggttcgctgggcgacatctacggcaacgtatttgtacgcgatgcaaacggtaaaatcctgctggaaccggcaacagacaaagacggtaaccccaacgccaaagccggcctgcctcaggttacaaccgacaaagccgccaagataggcaacttcaatcccgactggacactgggctggagcaataccgtgacatacaaaggtttctcgctttacttcctgattgacgcacgcgtaggcggcgacgtaatttcgctgacacaagccggactggactatgccggtgtgagcaaggcaaccggtgatgcccgcgacgcaggctactatatgctggaaggacaaaagattaatgatgtacagaaattctatcaaatggtaggcgaccgcggcaacggaacaacggaattctaccgctatgacggaacaaacatccgcttgcgcgaagtatccttgggttactccttcccgcagcaaatgcttgaaaagaccggattcatcaaaggaatagacttgtcgctggtggcacgcaacctgttcttcatctacaaagatgcaccgttcgatccggatgccacaatgtcggtaggcaatgacaaccagggattggacaccttcggcatgccttcaacaagaaacataggattcaacattaaatttactttctaaatacccgaacgatatgaataagataaaatatacaaccgcattgctcctcggcggtctcctgagtttttcatcctgtaccgacaactttgccgacttcaacagtaccgacggagcttatacagaagaattgcagaaatacgataaccagaccaacctcgtacctttcgccaccattcaaaagggtatcatctaccagaccggagtggacggtacggactggcaataccaggttatacagaacttagtggcggacatgttctgcggatacttccacgacatgaacggttcgttcaatgccaacaactccacctataatctgaacaacggctggacaagcgccatgtgggtatacacctacggatacgtcatgccttccatcgccgatgcggaagcgctgaatacagaaaaggaatggcctctttaccacgccattactaagattctgaaagtagctaccctccatcgtgtgagcgactattacggccctatcctttacgacggattcggaacagccgaccagaagccacagtcacaggaagaagtctacaaacgtttctttgaagacctggaaacagccgtgaacatactgaaagattataaaggcggcgtatcctttgaaagcgccgacttcatgatgccggaaggcaaacgcactcccgcacaatggctgaaattcgccaactctctccgcttgcgtctggccatgcgcgtatctaacgtagctcccgaacttgccgagaaacaagccaaagcagctttggatgctgccaacggcggtgtactggaaacagccaacgaaacggtaggcgaatacggcatccgcaatccgctgggtggtgttgccggctggagcgaagtgtatatgaacgcaagcttggagtctttcctgaaaggctacaacgatcctcgccttaaatcctacttcaacccggcacaagacggcagagacaaagacggcaacattaacagagaagttgccggagtaaaacaactcagcagcattgaagatgaatacaaaggtgtccgtcaaggcacaggcgtagccgacaaccgctactccacacactcgcagaccaccgttacaaccgccagtaaaatcattgtcatgagcgcggccgaagtatggttcctgcgcgcagaagcagccttacgatataacaccggcgatgatgtggaaaactgttataaacaaggtgttaccgtatcctttgcacaatgggatgccaatggcgtcagcgattatctggaaagtgacgatagaccggctgcctacgtagatgtattcgatgctaagttcaatgcggatgcaccttcaacgatcactccgaaatgggacaatacagccgataaggaagaaaaactggagagaatcatcactcagaagtggctggccctctatccggaaggttgtgaagcatgggcggaacaacgccgtaccggttatccgcggctcatcaaggttgcggtgaacaacagcggcaataccatcagtaccgacgatatgattcgccgtgtattcttcaaccaagattacaagacggacaacaaggcattgtatgacgctttagtcagcaagctgggcggtgcagacaacggcggcacacgtctttggtgggataccggacggaataacttctaaaaaatacaaaggcatattttttgattagtgatgttttctccgtattagttattacgggaaaaggttgcaaggagcaaagtcggggggctttgctccttcttttcatatataagagaccgaagcggttcccctttttccataaggcataaacaaactgtcttataacagcgcccggacaattgcaagagcttgtctgcctaaaggccgggagttattcggataagtccgcaggttttgaggtgtaccagcagctggtacggcgtgtaccaacaagtggtacggcagctaccaaaggttggtactccatgtaccttaggttggtacggcaagtaccactgcttggtacaagacataccaaagggcagtaccaacctggtacatatatcttattgattataagtgctatgatacttatttatattcctgtatcggaagctcccccctcaatgctccaagcgcattcagcgccaatgcttccatttcatcctcacccggataaacatgaaccggtgcaaggaacgaaatgcgctccttcagacgggaaatgatataatcggaatgtgccatgccgcccgtcagcagaatggcatctatcttaccgtacaacacaacggaagccgcaccgatgcttttggctatctggtaaatcatggcatccaacaccaacccggcatgcttgtccccttcctctatccggcggacaatggcaggcacatcggtcgtgcccaaatgggctgtcagcccggcacggccggagatacgctttttaagttcgtcttttgtgtagcgaccggaacagcaaagatctatcaactgcccggcaggaagcgtaccggcacgttccggcgagaacgggccttcaccgtcgagcgcattatttacgtcgacagccttgccatgatgatggacgccgacggagatgccgccacccaagtggcagacaatcaaatccagctcttcgtagcgcgtatgatgctcggcggcatagcgacgggcaatggcgcgctggttcagcgcatgccagatagtgatgcgaggcataaggggagaaccggtgatgcgggctatctcgtccagctcatccacaacaccggggtcggcaatgaatgcacggcagcccggaagcagcgcggccagttcggaagctatgaggcatcccaaattgcaggcatgggtgcgcatggcatgaagaatatcatccagcatggcgtcattcacctcatatacgccgcccggtatgggctttagcagtccgccgcgccccactatggcgtcaaactcaaaaggtatattattggcttccaattctttcagtaccagattcttgcggaattcaaactggtcgatgatatgagaaaaggaagacagttcgtctaccgtgtgacggatgcttcgtaccaagcagggtacttcgttctcgtatacggcaatttttgtcgaagtggaaccggggttgatgacgagtaacttcatcgatgtatttattatttacgatttacaatttgatagttgcgaaatatcattcgcagtttccgaaccgcaactggtgaggcatgccatagcaatgctgtaatacttggacaagccggaatcgctgcgcgaaggtagcacaacagggcatataggtccttgaagcaaccccgccatatcggcatgagagaaaagggagacagccttatagaaagcattgcccgattcgatattcgggaaaatcaagacatcggcctcgccgttgatgggagatacaatgcctttgatgtcgccgctcgtcttttcgcaggaagtctttacatccaatgggccgtcgatgatgacatttccgaactcgcctgcctcggcaagttccacaatattgacataatccaacgaatgagggaacttggcgctcaccttttccgtacaatggataagtgcgatacgcggctgttcgataccaaaatggcggcaggtatggatggcataccaaatcatctctatgcgctgctgcaaggtgggccggggaatgactgcggcatccgaaaagaacagcagtttatcataggtgggaatctgcatgacagccagatgtgtcagaatctttcctttcggcagcagtcccttttccttgtcgagaatggcatgaagcagattatccgtattgataatacccttcatcagaatatccgcaccgccctcacgcacgatgcgcaccgcttcgcgcgccgcttcatccttgtcttcaatatgcaacgtctgcacatattcgggatatttctttaaagtaggatatttctccaaaatggccgaatcgccgatcatcagaaattcggcaatgccttcgtccaaagcacgggctatggcatattcagtattggggtcattggcacagactacggcaatgcgtttccttttatttaaggtcttgagatgagaagttaattgatcaaagttccgaataggttccataacgttagatttttagcaaatatctaaaaaaatgtcgagaaaaagaacggtatacttcattttatttctatgttttatatcattttgacaggtttaatacggagagcacagagtttcacggagttttcgggacaaaaaacatatttctttatcacatttttaagacaaaagaacaaaagaacatattccgctttgtctttttgttctttggataaaaaaaacatgccatgtcgcaagactgaacatgccgtgatttgccgcaataccccttaaagaaataaaaaaaactccatgaaacactgtgccctctgtggtgaattatgtacttttgtcacaaatacagagagatatacaatatgaacagccttatttttccgccatacgtgcacgagggcgaccgggcgataatcctctccccctccagcaagattgacaagtccttcctgaaaggagccaaaaaacggctgaagtcatggggactggaggttatcattgccaagcatgcaggcagtgcgcacggcacttacgccggaagcatacagcagcggttgaaagacctgcaggaagccatggacgacgagaaagccaaagttatcttttgcagtcgcggcggatacggtgctgtgcatctggtggggcagctcgacttcacccggtttcgccagcatcccaaatggcttatcggcttcagcgacatcaccgccctgcacaacgtgtttcagcaaaacggcttcgcttcgctgcacgctcccatggcacggcatctcaccgtggagccggaagatgatctttgctgccaggcattgaaagacatcctgttcggcaataaactgcaggaagaaacctcgttcagctatacctgcccggcacacaagctcaaccgcaaaggcgagggaacgggcatccttcggggcggaaacctggcggtgctttacgggctgcgcggcacgccttatgacattccggcagaaggtacggtactcttcatcgaagacataggcgagcgtccccatgccgtggagcgtatgatgtacaatctgaaactgggcggcgtactcgaaaagctgtccggactgattatcggacagtttaccgaatacgaagagaacatgtctttaggcaaagagctgtacggcgcattggccgatttggtaaaagaatacgattatcctatatgcttcggatttccggtgggacacgttacgatgaacgtaccgatgattaacggtgcgcaggtcacgctggaagttggaaaaaaagaagtgaaactaacatttaacacccacaaagaatgaaacggaattatacaattatcccactgtcactgctgttgctcatagcgatggtagcgtgcagcaataaaagcaaaggcaataccgacagtgagggaaaacaacctaagagcacggtcagcgtaccccaattcgatgcagacagcgcttaccggtatgtcaaggagcaagtagacttcggtccccgcgtgcccaatactgcggcacacaaagcctgtggagaatatcttgcaaagaagctggaacaattcggcgccacggtatacaaccagcaagtggatttaaccgcctatgacggcaccctcctaaaagcccgcaacatcatcggcagctacaagcccgaaacgaagaaacgcatcgtgctgctctcgcattgggacagccgtccatgggcagatgctgactctgacgagaaaaaccgtcacacacccattctcggcgccaacgacggtgcgagcggggtaggcgtattgctcgaaatagcccgccaactgcacaaacagctacccgaactgggcatcgacatcgtactggtagatgccgaagactacggccctcaccaatcctatacaggcaaccataaggaagagtattgggcgctcggttcgcagtactgggcacagaatccccatgtccagggatataatgcgcgttttggcatccttcttgatatggtaggcgccaaagacgccactttcttctacgaaggatactccgaagagtttgccaaaggcatcaaccggaaagtatggaatgcggccaataacctgggctacggacgttatttcgtaaaagaaaaagggaatatcgtaaccgacgaccacctttttgtgttccggaacgcacgcatccctaccatcgatatcattcaatacagcgaggaaaccggattctacgaaaactggcataccctgaaagatgatatggacggcatcgaccgcaacactctgaaggcggtaggccagacggtcatggaagttatctacaatgaaaaataaatactaaagataaaattattatgagtatcaacgaagtacaagatgaagtaatcgccgagttcaatgatttcgacgactggatggaccgctatcagctcctcatcgatttaggaaatgaacaggaaccgcttgatgacaaatacaaaacggaacagaatctgattgaaggctgtcaaagccgtgtatggctgcaggcggacgaggaaaacggccgaatcgttttccaagccgaaagcgatgctttaattgtaaaaggcattatctcgctgcttatcaaagtgctgtccggacataccccggacgagattctgaatgcggacctctactttatagacaagataggattaaaggagcatctttctcccacacgcagtaacggattgctctcgatggtgaaacagatgcggatgtatgcactggcattcaaggcaaaaagcgctaatgattaagcagactgttgctatttcgagggtgtgtcaaaactaacattcgcttgctatttgtttctttttaggcacggattacacggaaaacacagattttctttgtttttctccgtgaaatccgcgaaatccgtgcctaaaagaaatcatcaaatgtattttgacacactctcatatatataccatcggtttacttttcttctccctccacatactccagtatatctcccggctggcaatccaataccttgcaaatagcttccaatgtggagaaacggacagcctttgccttaccggtcttcagaatagaaagattcgccggcgtaatgtcaatcttctccgccaactcccccaaagatatttttcttcgggccatcataatgtcaaggtttactataatcattttctttttcccaatattcggttaaatagtcaagtcctgttcttctttcatcttcaatcctattgcgaatacctcggccacaatcaatgtggaaattcctaataccaaagtagttgtattcaccgtatccgaaagatgcaactcgtaaccatgaacggaaaaaacattgcctacactcctaaaagtaagatatgccggaagaagcgccgtacagaaactgataatcaatgccgcccctaacaggcgcaagcggtggacgttcttccagttgaagatatcggacttgttgatagaaatgaccaagcggacaaacagcacaatactccagacacatataactatatggagaaaattcaacaaagtaaaagcagcctgctccaaagttgtggattccgtatcgacactgaccatcatcgagttgaaagagaccggtacatattcaccgctcctttcattataaacggaatcttggaaaagaccgttatcgcccaaaccggaaaggtgctccggcaacaggctgatgtacttcatgttcatcagttttttctggcttgcctcggaagcattgccgtcaatcccggcttccacaccggctttcacccctacgataaaatagtagccggtctcaaaaaccgaatagctcaacacgagcactacaatcacacaaagaatattcagtcgtcttttcatattttaaaagttgtatcagttgccggtaaccgataagaattcattactttacaagagacggcaaacaacactgccgctaccgccagacagctccaataggccggttctccaagcaaatcggatgtatatttcacatcgggataatgcaaactgaggaataccgacaggctgttgttcagaatatgtattaaaattccaggaatcagactgcccgttctataatagagccaggcaaacaagcctcccgataatatagcacctgccacctgtgccggattaatatggaaaattccgaaaataagggcggaaaggataatagccttcaccggactgtacctttgcagcaatacttttgtaatcgccccccgaaacaacatctcttccaagacaggccctaacaccgagatacagataatgcccagccaacccgattgcaacacatcgaatgtagctcccatccaatcaggcaggaaagacaatctggacatcacaaagtctatcaggaaaatagtagaaaggcctataatgatactccatcccaaataagcaaccgacaccggagaccatatccgcccgtcatctttcaaatagcctttcttccacaaatagccacccataccgacaaatcccagcaacatactcggagccaaagctataacgcttgcagcatctatcgtaccactgactgcatacgaataaagcatggcaaaaggcatcaccaacaatgcagccaaaatctgcattacaaaataaatcaaaaccagttttattgctgttttcatcgttccttcttttttaagagcgtgtaaagatacacattttcctgcaaacccgtcaagccgcagcagcaactcccattaacaacatcatcaccatagaaagtgacagtaccaacaatgtaatactcataaatgctctcttcataaccgtagactttttataatcagcacttattcttatctacctattctgtttctcaataagaatttatcgtttttcgatatgcaaataaaagagctttttctgaaaagacaaagagaaacagcatgtttttatcgaaaaacaataaaaaagatatgtttttcaataaatatacaagaaagagctcaataatgaaaacctgaaaagcagtgttatgaaagaatcgcagtgatttcagcctcgtccttatggagctgcgctatcagttcgtctatggaatcgaacttcagttccggacgagtgcgacaaacgaaggacaaccgcatgggttgattgtaaatatcagcatcaaaattaaagatatgcacctcaatgctacggtctatgccattattcaatgtcgggcggtagccgatactcaacatccccgcatgcttttccccgccaagaaaaacataaacggcatataccccgtcagccggaaccagtttttcacaatcgccaatgcgcagattagcagttggaaaacctatcttacgcccaacgcggtaaccgttcacaaccgtaccgtccaaaaaaaattgataacccaaacagtttgccgcctccgaaacgtttccttgcagcaaaaggcggcggatagctgaagaactgaccgtcattgcatcggtgtaataagcctgcgccaatagcacttctattcccaactcctgtccataacgcacataatcctcaaatccttcactccgattatgtccgaaacggtggtcgtaacctatcattaaaacctgcacccggtaatcttgctttaatatagccataaattgtttggccgacaggcacgccaaatcaagtgtaaaatcgagcatgatgcaataatctatcccggtaccggcaagcagagacactttctcatcgcaagtggtaagcagctcaggacgaaaatcgggttgcatcactttgcggggatgaaccggaaaagtaattaccgatgaagcaagcccacgttcagccgcaactttacacacctgttctatcaggaaccgatgtccccgatgcactccgtcaaaaaagccgatagtggctacattgggcaggagttcattaccagatgttccggtacataattgcatactcacctcatgcggtttggttcatttaaataaatggctccagtcttcaccggctttcggaacataagtggaaatacctaatgaccgggcagtcatacaattggcttccgaatcgtcgataaagaaagtttctttcggatccagacccgcatcatccagcactttgcggaagatttcttcatcgggcttcgccatcttcatttcataagaaagaaaaatatgttcgaaataatcttctacgcggaatgtcttatagggaaaagcatgttcgcaggaccacttccaatggatttcgttggtattgctcaacagatataccacatagtccttacgcagggccagcaataaatccagtttataggtcggtatgctcaccaaaaaactgttccatgcagcatcaatccgggcatcgtcaacgtcttttcctatcttttcccgtatcacattccgaaaatcggcactggaaataaggcctttctcatattgctggaaaaaatcctgctggtgatataggtcgagggtgtgttctacatccggcaaccccaattctctaaagttctccaaacaacgttggcggtctaaatcaatcagcacaccgccaaagtctactataaggtttttaattccttttcttttcattatctcatttttgcattagacgtcggacaaggcgaataccttcgcccacccataataccaaagaagtagaagcaatgattatcatccatgtcgtaaaatcaagcggctccgtacggaatacagccccaccgaactgtacgatgacaaactgaccgcccagaatggcaagtaccaccaactccatgccgtaggatttggatattcccttaaaagcggagtccgatgttccaaacactctcgcattgaacaggttccagaattgcagcataacgaagaaagtgaagaagattgtaaggcgttgtaccgtcataccgccttcttcattgttaaaccggaacaacatgcccataagcaatgccaggaaaaccactcccatgccaagtatataattccgcatggatttggttataatgaaatctgtacttttgcggggtttctctttcataacactctcactgggtgggatagacgccaaggccaaagcggcaaaggtatccataatcagattcacccacagcatctgcgttacggtcaacggcaattcagtacccaccagcgaacccaacagcacaatgaacagtgccacgaagttaatcgtcaactggaatacgatgaagcgctggatattcttatacaatgaacgcccccacatcacggccgtaccgatactgttgaaagagtcgtccaacagcgtgatgtcacttgcttctttcgccacagatgttcccgttcccatagacaaccccacctgtgcatgattcaaggccggagcatcattggttccgtcacccgtcacggctaccaccgcgcctttctgttgcagtagctgaacaagacgttgcttatcggtaggacgggcacgcgacataatcttcaagtccagcacccggtcgagcgcctcttcgtccgtcagttcggcaaaggcagcacccgtgatacggttacgttccgtatcttccggtttccataagcctatctgccgcgcaatttcggttgccgtacccggcgtatctcccgttactatctttacgccgatacctgccgactgacattttgcaactgccgcaggcacatccggacgtatagggtcactgatggccacaacgccgaggaaagacaaatcgttttctgcaaccaatgccacacagtcggccggttccgtatcgtctactatcttataggcaaaaccaagcgtacgcatcgccatgttctgatagttcagcaactgagcctctaccgtagaacgatattctaccgcatccacccgcttgccgtccaaaagcacgtccttacatttgcccaatacaatttcgggagcaccctttacataaagtattttcttcccaatcagaggagagtgtaccaatgttgccataaacttccgttcggtagagaaagtcaactggtcaagcaccttcacgccctctctcaactccagataattacgctgctggctattgagccacaacaataaagctacctccgtaggattacccacgcctttgggcttctcttccggagtcgtttcctccagaaaagctgtagaattggcactgatcccttccattaccaatttactcaaatcatcttctcctatttcctttccgcccttcaatccgtagaaattcggttcatacacctgcatcaggttttgtgtcagcgtacccgtcttgtccgtacagataacggtaattgcccccattgtttcgcaggcgtgcatcttccgcaccagattattggtggaaagcatgcggcgcatattcagtgccagactgagcgtcacactcatgggcaggccttcgggaacggcaacgacaatcaaggttactgccatcataaagtactgcaaagtagctttcaaagcaggcagccattgttcaaaagtatggaatgaggcaaaatcataaaccaggacaacatcctttataaagaagatagcgaatgcaagaccggctaccgaaaagccgattttccctatgaggttggcaagttttgtaagctggatattcaacggagtaggctcggtagtttgttcggtactctggcgggcaacttttccgatctccgtggcatcacccacaaactctacacgcataactccgtgtccgtcgaccactgttgtaccgcgcatcacacgattggaagcataagtggcttcttcatcaaaatccgcctctacagtagttttggtcacaacaggctcacccgtaagattagattcatttatctgtaaagaaacggcttccagcaattcaccgtctgcgggaatttcctcaccggtttccaatataacaatatctcctactaccacatccttacggggaacctcctgtacatgtccgttacgaatcacctttaccaaagtttcctcgttcactgcgttcagtaaatcaaactttttattggcgtcgtattcaaaaaagaagccaatgcccgtagccagtaaaatagcagctatgataccgattgtttcggcatattcgttctccactatggaaataatcaaagagaagaaagcggccaccagcaatactcttactacggggtcttcaaacttttccagataaagtttccacaaagacgggcgcttcggaggcgtcaacaggtttacaccatgctcggtacggctcttccgtacttcgtcgtcggtaagtccgacgtgatacaaatcatcctttgttgcagtcatgcaattcgttaggtttaaattgaattgcaaaaatacaacaataatttgtatagagaatgttattaaatctttttataggttttacaaatccggcctttttcctttctatgaacatctgccagccacttccatagaaacttacttcaagaacctactaacaaaaacatctttttctgcccgaacggaaaacaaaaagggaaattcaattgttcttaaagaagaaatttaaatacaagacaattatggaaaagtacatctgcactatttgcgaatatgtttatgacccggaattaggagatccggaaaacggaatagaaccgggaacatcctttgaggacctccctgccgattgggtttgccccttgtgcggagtaggcaaagatgaatttgagaaagcgtcctaagacgctttcttttcttttatatcgctgctggcttctactacattgacaacgtaatcgcccaacttttcacattcggcaatgatatccatatagtagactcccatctggtaatcatattccttgttattgacatcaaggatattctgattcttcaactggttgcggtaattgttgatttcattctcgatattaaacgacttgttcacatcaatgccttgatgatccgaacgttccaccaccacaatcatctgcccgagagcatcatcggtcagtttcatcataaagtggatatgttcatattgcttctctgtgaactcctgattggtctgacgcttgcgattgatggtacgtgccagattataacaactgtcaccgatactttctatctccgtcacttcgcgcagcatggcccggatttgcagcttactttcagaacttaaccgtccttccgacacctgattcagataattggcaatctccagttccatgctgtcgctgatattttcatacttttctatccgactgaacagcttattgaaatcgtcatctttctcggtatgcaacaggtcgcgtaccataccgaacatacgatgcgtacgttcggcaaacagatgaatctccttgcttgcctgcagaatggaaagctccgccgtagaaagcataccgcccgtaataaagcgcagacggtattcctcgtcctgttccttctgcggaataatggcgcagaccgtacgctctataaacttcacgaaccatatcaatatcaacacattgcagatattaaaacaagtatggaaagccgacagcttaaaggaaacggcaacggcagggtctttggttcccattatattttccacaaaccatgatactccctgcgtaaaaggaacaaacaggcataacacccatataacaccgaacacattgaataccagatgcgccaatgcagccctcctggcctgcgtattaccggtaagcgccgcaagattggctgttatggttgttcctatattctcacccagaacaagtgccgctcccagttcgaagctaatccagccattcgcacacatgataagcgtaatcgccatcgttgcagcagaggcctgcacaatcatggtcagtaccgttcctataagcacaaaaagcagtacggatatataccccatatcggtataatcctgcacaaaagccagcatttccggattctggctcaaatcgggtgcattgttcttcaaataagaaagccccataaacaggaaagagaaaccgaaaataaattcaccgatggatttgcgattacttttttgagagaagaggagaggaatgccaaaggctaagagaggaagagcaaaagcagctatgtcgactttaaaacctaatgctgaaataatccaggcagtaacagtagtaccgatattggcccccataataacacctatagattgtgacagggtcagcaacccggcgttgacaaaactcactaccataaccgtagttgcagaagaggactggataagcgctgttataagcacacctgtcagaacgccggtcacccggttggtcgtcatagcggttaaaatcttccgcaagcggtcgccggcgaatttttgaagtccctcactcataattttcattccgtagaggaacaatgccaatgagccaagcagctttaaaaaatcataaaaagaatattccatctttaattagttaaagtgtttcattgtaccatttgttataatgtcctatatttagcgtattaataatctcaaaaaaagacaccatgaaacatatgttacaaatttgttgcaaaaataataatatttataaagaattccctatagggagctcacttttggatatttattacggttttaatcttaatttcccctatcaagtggtcagcgccaaagtaaataaccgttccgaagggctgaatttccgggtatataataataaagatgtggaatttctggatgtacgggattcctccggcatgcgtacatatgtccgctcactttgttttatcctatataaggctgtcagcgaattgttcccggaagggaagctgtttgtagagcatcccgtatccaagggctatttctgcaatctccgcatcggacgtcctattgagctggaagacgtgtcggcaatcaagaagcggatgcaggaaatcatagccgaggacatccctttccgtcgtaccgaatgccataccaccgaagccgtacgggtattcagcgaacggggaatgaacgataaggtaaagctgttggaaacctccggctctatatacacctattattatacattgggagatacggtagattactattatggtaacctgttgcccagcacaggttttatcaagctgttcgacatcgtaaaatattatgacggtctgctgctgcgtatccccaacaaagaaaacccgaccgtactggaagaagtggtaaaacaggaaaagatgcttgatgtattcaaggaacatctgcattggaactacatcatggggttaagcaatgtaggcgacttcaatctggcatgcgaagccggacatgcaaccgacctcattaacgtagcagaagcccttcaggagaaaaagattgctcagattgccgatgaaatctatcaccggggagaaaacggcgaccgcgtaaagctcgtattgatctccggcccttcttcgtccggaaaaacaactttcagcaaacggctttcggtgcaactgatgaccaacggcctgcgcccctaccccatttctctggacaattattttgtagacagggaagacaccccgctggacgaaaacggcaattatgactacgaatctctctacgccctcgaccttgagctgttcaacaatcaattgcaagctttgctacggggagaagaagtggaacttccccgattcaacttcacattgggcaaaaaagaatacaagggagacaaactgcgcattgacgagcacaccattcttatattggaaggaatccatgccctgaatccggagctcactccgcagattcctgccgaaaacaaatacaaaatttatgtatctgcactgaccaccatctcactggacgatcacaactggattcctactacggacaaccgcctgttgcgccgcatcatccgcgacttcaactatcggggatattcagcacaagaaaccatttcgcgctggcccagcgtacgtgccggtgaagacaaatggatattcccctatcaggaaaatgccgatgtcatgttcaattccgccctcttgtttgaatttgccgtactgcgttgccatgcagaacctatccttaccagcgtaccgcgcaactgtccggaatacgccgaagcctaccggcttatgaagttcatcaaatacttcactccggtacaagataaggaaattccgccgacatccctactcagggagttcttaggcggcagtagtttcaaatactaacccgacacccaaacaatctctttgtccggaaccggcaaacagcttcggtccggacaaaaattcctgccataccaaacattctgttaattctgacagggaattacaaacatccgcatacaacagacaaagaaaactttaactttgtaggcaaacaaaacaaatccggttataatgaaaaaaagcattcccatacttcttgcggttctcctttgcctgtgtacccaaacatttgcacaaaaccgcgctgatgaactgatgaaacaggcacaggaaaatctggcaaagaaagaatacatcaaggcacgctatctctttttacaggcttacaatgccttcgccacgcaagaaaactatgcccaggctgtaaaatgcggtgtaaatgccagcgccctctatcaccgggagaattattataaagaagcattcgaactgctgcgcaatgccgaactgttggtgagaaccggcgaacaaaaactcaaaaaggactttcctgatttacgtttccgcatcaacaaagaacgtctgcaaatgtacatcagcctcagaaaccccacccgtgccaaagaacagttaaacagactggaagaaacagccaaagctgcccaaaatgactctctaagcaatgactttctgtatacccaagccagctattactacactttcggcatgaattcgcagggagatacagctttcaagaaactgatagaacagtataagcaacaaaagaactacgccaaagcggatgaatgctatcaaaatctcataaacattgcccttcgggcaaacgatacagaattaatggcgcgtacttacgacaaatacattacctggacagattctgttaaagcactcactgcacagaaagaattgaatgcattgaaaaagaaatataatgaaagtctgactatcattcaggaaaaagacgactctctttcctccaaacagcatatcatcaccggtctttgcgtcctggcagccattttagcggcagcattagtggcaggagccatcatattactacgcttcatcctactgacacgcaaacaaaagaaagcaattggcattgccaacgaacacaatgaactgaagaccgaattcatccaaaatatctccgcccagatggagcctacattgggcactctcgacccgaagctgcccggcgtacaggcattgcgtactttctccgctcacatacaagagctgtccgaactggaaaacagcctatcagaaccgtatgaaatgcaagaagagaatatttcggctttctgtgaaaacgttatgaacaaaatacgcggcaaagtacaggaagatgtatccctcattgtcaatgctcccaaactgaacataaagattaatccggaacacctggaacgcatcttactacatttgcttgaaaacgcggccgaatacacccccgccggcggaaaaatagggctggacttcaaaaaacgcggcgcccatacacatcagttcatcataagcgatacaggctgcggcatcgccgaagaacagcgcgaaaacatattcaagccttttaccgaagtaaaagacctgacacagggcgatggtctgggattacccatctgcgcactgattgccgccaaaatggatggcagccttacattggacagtagctatgcgaaaggcacacggtttgtattggagctacacacttaaaaaaatgagaattaaaaaattgagagttgaaaatgagtgccgccattgtgctacacggtaattttcaactctcagttatctttaactatctcaacgcttccacttcttccggtgtcagcggaatctttttgcctaaacggcgtgcgccggtttccgttatcagatagtcttcttcattgcggatacctccgaagttacggtattcttccactttatcataattaatgaagtctttaaacttcttctctcctttccaaaggtctatcagttcggggataaaataaatgcccggctcaacggtatgtacaaaacccggttccagaggaatggcaagacgctggctcttacgaccgaactgcgtactcttaggctgaccgttgtaaccaacccaaatctcgccgaggttttccatatcatgcacatccagccccatcatatgccccaatccatgaggatagaacaaggcatgtgcgccttcgcgtacagcatcttcggcattgcctttcatcaaaccgagttctttcatgccctctaccattacgcgggcggaaaggtcgtaaacatccatataaggaatacccggacgaagcgctttgacagcctccagatgcattgcattctgaatttcataaacagcccgctgacgaggggtaaacgttttatcggcaggaacggtagaggacatatcgcccgcataacccgactccacttccgcaccggcatcaatcaggaataaatctcccggcttcaccttattgccatgataatgattgtgcaaagtctgtccgttgacagtggcaatcgttgcaaaagaaagctcgcaattattggattcggccacccggttcatttctgctacgacttcgtattcgtacatacccggacgaagtactttcatagccgtaatgtgcatatcagccgtcacattacatgccttttctatctcttctacttcttcggcagacttataactgcgttgtgccacaattgcacggataaatggaacagaaccttcctggcgtgcaggcggaatgcccaaccactccatcagtttcaatttatgctccgccctgtagggaggcaggtaatgcactgtctgtcccttgcgcactgctttatgcagatagttcatgatttcggcagaaggcattacttccgttatgcccacacgcccgcttttctctttcagggtaggctgcgttcccatccatacgatatggtcaatcgtaagttcatcgccaaatataatctccttgtcctcatcaatatcgataatcgccgacaaaccggcaaacgacaaaccgaaataatacaagaaggtagaatcctgacgataacggaaagtattgtcctcataatgcagtccttgttcgtcattacccaaaaacagcaacactcctgagcctatatttttcttcaacagggcccgacgctgtatatacgtttctttagcaaacataatgttcatagttttagttgttataccacaaagataaagagaatatttgaaaggataaggaaaatcaggaaatacagacttacaacccaacaagaaaaaacaaccgaaccgcagctttcttgttaaatataacagaagaagatttttcgttcccgaactattcactatttttgcaaaaagtgcgaagataaaacttatctttgcagcggataaataatgtaacttatggcacaaggctcccgacagatacaaacccaagcgcagcagcagatacagacgctgtcaccacaacagattctggtagtaaagctgttggaacttccggcaatagagctggaagaccgcgtacgtgccgaacttctggaaaatccggcactggaagagggaaaagatgatacatccggcgatgaatattccaatacccccgatgcagactccaatgcagaagatggtggagataccgattacgattctctgagcgactatctcaacgaggatgacatacccgactataaattacaggaaaacaaccacagcaagggagaacaagccgaagagatacctttctccgatacgacttccttctatgaaaccctgaaagaacagctgggtgagcgcaaccttaccgaacaccagcgtgaattggccgaatatctcatcggctcattggacgacgacgggctgctgcgcaaatcactggacagcatcagcgatgagcttgccatttatgccggcatcgaagccactaccggagaactggaagaagcattgagaatcattcaggatttcgaccctgccggattgggagcccgcaacttgcaggaatgccttctcatccagatacggcgcaagatagaacagcagcacttcactcccaatccgattctttatattgaagaagcaatcatttccgaatgctacgaggatttcacccgtaagcattgggacaaaatacaacagaaactcgggctggaagaagatgctttccagcaagccataaaagaaatctgcaaactgaatccgcgtccgggagcgtctttgggtgaagctatcggcaagaacctgcaacaaatcgtacccgattttattgtggatacctatgacgacggcactatcaacctgtcgctcaacaaccggaatgttcccgaactgcgcatgagccgcgatttcaccgaaatggtagaggaacacaccaagaacaaggcaaaccagtccaaggaatccaaagaggccatgatgttcctgaaacagaaaatggatgcagctcagggatttatcgatgccgtcaagcaacggcagaataccctgatgactaccatgcaggccatcatcgacctgcaacgccctttctttctcgacggtgacgagtcattgcttcgccctatgatattgaaagacgttgccgagcgcacaggactcgacatctcaaccatctcccgcgtcagcaacagcaaatatgtacaaaccaactacggcatctacccgctgaagttcttctttaacgatggatatgttacggaagacggcgaagaaatgtcagtccgggagatacggaaaatactcaaggaatgcatcgacaacgaggacaggaagaaaccctataccgatgacgaactgaccgagatattgaaaaagaaaggataccccattgcccgccgcaccgtagccaaataccgccagcaattaaacattccggtagcaaggctgagaaaatagaaacggcacaaggcaatccaaacggtagagtgataatgcaaaaataaaaaaatggcaatagaacaacatattatagcagataaaaaccttatcaggacagccagggtaatttcgatgatatttacaccattctccatacctttcatggcatttctgattctgttcgtattctcatacctgcgaatcatgcccctgcaatacaagttgattgtattgggcgtggtatattgttttacaatccttatgcccacactgaccattttcctctttcgcaaaatcaacggattcactcctgaggatttaacggaacggaaacggagatatgtgcctttcatcctgactatcacttcctatgtgttctgcctgctcatgatgcaccggctgaacattccctggtatatgacaggaattatctttgcctctcttatcgtgatgattatctgtgtcattgtcaacctgaaatggaaactcagcgaacacatggcgggagccggtgccataataggtgggctggttgctttcagtgccctgttcggatacaatccggtgggctggctgtgtatattcattctcgtagcaggcgtattgggcacggcacggattatcctgcaacaccatacgctcggtgaggtaatgggcggatttgccgtaggactgatttgtaccttgctggtacttcatccgctcagcaaactgttattccgtctattcagcatattcttattttaaatatcaaatattaactcttaaaactaacgattatgaattttcctaatgatgtaaagtacacgaaagaacatgaatggattcgtctcgaaggagatgtagcttatgtaggaattaccgattacgcccaagaacaattgggagatatcgtatttgtcgacatccaaaccgtaggcgaaacattggcagccgatgaagtattcggcaccatcgaagtagtaaaaaccatttccgaccttttcctgcccgttgccggagaagtgctggaacaaaacgaagcattggaagagcagcccgaactggttaacaaagacccgtatggcgaaggctggctcatcaaaatcaaacccgctgccgatgcagatttcggcagactgctggatgcagaagcatacaaagcactgattaataattagcgtttagtgattagtgtttagtaattaggagtaatgattagcagtaataattagcagtaataatttgttttaaaatcttttctcatcaatcccctaatcactaaacactaatcactaaacgctaatcactaaccactaatttaaataatatgtctccaattgttagtatcatcatgggcagtacttccgaccttcctgtcatggaaaaggccgcacagttgctcaacgatttgcatgtaccgttcgaaatgaacgccctctccgcccaccgtactccggaagcagtagaagaatttgccaaaggggcacgtaaacgcggaattaaagttattatcgcggcagccggcatggcagcagccctgcccggcgttattgcagccaataccacactgcctgtaatcggcgtgcccataaaaggctccgtactcgatggagtggatgcgctttattccatcattcagatgcctccgggcatccctgtggccaccgtagccatcaacggagcaatgaacgcagctattcttgccgtacaaatgcttgcattgagcgacaaggaactggcagaagcctttactgcttataaagaaggtctgaaaaagaaaatcgtgaaagcaaacgaagacctgaaagaagttaaatacgagtataaaacaaactgaaagaagtgattgataatcactgaccattaatcactaataacgtggatatattcaattattcccgacgggaaacatcagaagtgaatatcggagccacccctatgggcggctccaatcctatccgcatacaaagtatgaccaacacttccacgcaagataccgatgcgtgtgtagcacaggccaaacgtattgtggatgccggtggagaatacgtacgtcttaccactcaaggtgtcaaagaagcagaaaacctgatgaatatcaacgcagccttacgtcaggacggctacatgaccccattggtggccgatgtgcatttcaacccgaaagtagcagatgtggcagcgcagtatgcggaaaaagtccgtatcaacccgggcaactacgtagactccgcacgtactttcaagcatctggagtataccgatgaagaatatgcacaggaactccggaagatacgcgaccgtttcgtcccgtttctgaatatctgcaaggccaatcacacggctatccgtatcggtgtgaaccacggctcgttatccgaccgtatcatgtcgcgctacggagacactcccgaaggcatggtagaatcgtgcatggagtttctgagaatctgcgttgcggagcaattcatggacgtagtcatttccatcaaagcatccaatacggtaatcatggtgaaaaccgtacgtttgcttgcccacatcatggagaaagaagggatacacttccccttgcacctcggtgtgacggaagccggtgacggtgaggacggacgcatcaaatcggccttaggcataggtgctttgctggcagacgggttgggtgataccatccgcgtatctttaagtgaagctcccgaagcagaaattcctgttgcccggaaattgacggactatattgtacaacgccgtaaccacccttacataccgggtgctgtagctcccgaattccagtacttgtctcctgaacgcagagccacgacagccgtgcgcaatataggcggagaaaaccttcccgttgtcgttgccgcacgcttggacggcaatatggatttcaatccgcagtttatgcccgactatgtatacgtgggccgtcaactgcccgaatctcccaccgaaggcatacaatacattatcgatgccgacctttgggaaggacaagccaacacatggcctgcatttaaaggcgaacagctgccgtttatcagcggatgcagcgcatcactgaaatttctgtttatcacctatatgggattgaacgacgaagtaattgccggactgaaataccacccggaagtggtacttgtcgcacaaagcaaccatcccaacagactgggtgaataccgtgcattggcgcaccaactgatgaatgaaggattaaagaatccacttgtcttcttccagcattacgctgagactgaaactgaaaatctgcaaatcaaatcggctgctgatatgggagcactcatcatcgacgggctctgcgacggtattttccttttcaaccaaaccggcaaggaaggcgataaggcgatagacgacaaggttgtagacaccacggctttcggtatcctgcaggcaggacgcatccgtaccagcaaaaccgaatacatatcctgtccggggtgcggccgtacgctctacgacctcgaaagcaccattgcccgcatcaagcaagctacatcacacctgaaaggactcaaaatcggaatcatgggttgcatagtcaacggtcccggtgaaatggccgatgccgattacggatatgtaggtgcaggacggggcaaaatcagcctgtataagaaaaaggagtgtatcgaaaagaatatccccgaagaggaagccgtagaaaagctgattgaacttatcagaaagaacggagattataccgagcggtaggtttcttattcttcaccacaaaaaaagcgcagagtctcacagagttttcttttgttccggatgcgggtaatgcttaccggattccccaaagctgtgagaccctgtgcttttttttgtgatgaatcctaatatctgaaactcaaaaatacacggaaggattttgacttcatcttccacttgtcactttcaattacatcctcaaagtccggagcatcataatccataccttcctcatcaaaagaaagtccgttataagtagctttcttcgcccaacgatgctctataccgaccgaaattgctttataggcaacagaagcaccaaacgcaaaattggaaacatatccgtgtccgaagctgtcatcgatgaccaccatagaataagtaggcacataatggaaataggcagccactttcaaatcgcctaccggattgactgtgacggagggacctacgtgcatagacgcatctatctgatgaatacccaaatcaaaatcttcctcgtaatagtcttcataaccactgctataatcattataagcacgtgtgtacgaacctccttccgcaaagacgtccggttcggaatacttggcatacgaaagttcaaaccatgttgcgtcaataccgaacttaatcatattcagcaacggcttcttatgcaggtaatacgtttttccgaaagtcagagaaacaccgaaatcacttttccattccgcttcggcatctactttatccgtcaacgtttggtttgtaatataaccgatattaaaatacttggctctttttttccatattctctcatttcgtgccgcatcttcggttttctgtactctgtcggagagttcatttaccacttgcagtaaagaatcctctctttgagaagattggacttcggaatcagcttcttgagcaaaaatactttgtcctgtcaaaatcacggttgacagcaccaaccaaaacagttttttcatcataatttgtctgtgttttgcttatggctccttcgttcagcataccagtaattttaggaaagcgcaggagcactaaagggaactccccttaacgcttatttcgttctatttttacaaaaatagaggattacacacatacgcacaacgggacaaaaacgagatagaaactaaaaaaccgaaatagcggactatttcggtttaaataaagattatgatgatgtttttttattttttattttttattttttattttttatttttcctttttgccttcatccggcttaaccggcgggacactgagcatttctttatatttttccggagcagtcaatatcccgacagcctctttcaggtccttatcatctttcaactgttggatgatacttccacgctgatagtaataacgtttgataatttccactgcaatcatctcctttatatcctttgagaagtggtcgaggtcacgctccaggttatgagatagctttttctccaaagccttgaattcgtcggacgcatccgtcaggtatccttcaaactccgccatttctttcaagttcttcaaaatcttctcagtctgctggtcgtacttgaaatctgctttctgtaccatcgccttaaagtcggcatagtcggcatccgttatcttaaaatctttaggagccggaatcgtggggtgcttcaaacaatactccgtagcgtaattaaatatcaagttgtcattcaccaagtagaacaggatattaggcaacttatcctgcttgacggtaatatcgggagtaactccgccaccgtcacgtacctcacgtccggcagcagtatggaatacggtagtcaagctatccggaatacgtcctacgctgccgtcctcattgcggtgtttgtagtcgatagcctgcacgcaacggccgctcggaatatagtatttggaagttgtcagtttcattgtgcctccataaggcagcggacgggtggtctgcacaagcccttttccaaatgtacggttacccaccactactgcacggtcataatcctgcaatgcacctgccaggatttccgatgcagaagctgttgcactattcaccagcacagccagcggaatttccaaatccagcggctcacgcaacgtcttgtacgtattgcttgcctgtttggtctttcctttcgttgtcaccagtgttttgccgcgcggcaggaagaagttggctatttccacggcttcgtccagcaaaccgccgccgttattacgcaggtcgataaccaaagaagttattccctgctttttcaaatcaagaaatgcctgcttgaactctttggaaggattaccggagaaagtgctcaggttgatataaccgatgttgttatccaacattgcataataaggaataaaaggcaactggatagaacgacgaacgatatcgaattccaacggctgttccgttccgggacgttgcaccttcagtttgaagctcgtgcctacctgcccgcgaagcatctcgctaacttcctgattattttttcctgcaaggtccttgccgtcgatttccataagaatatcgcctgccttcaggcctacggtagccgccggcatatgttcgtaaggttcggctatcatggaacgcttcagtttggtattccaggttatgatagagccgataccgccatacgtattcttcaacatctgttccagttcgctttggtcgtcttccggaaaatattgcgtataggggtcaagtgaatacagcatggattcgatgccggtacggatagtcttgttcgggtctatcgtatccacataaaacatatccaattcctttactatagaattgaatatatccaaattctttgctacctgaaaactacggttgtctccactcttaaacccaaaaaagaaacttgtacctactgctaccaataggacagctatccaacgtatctttaaatatttcatatattctaatttatcattattatatcttcctttatcttctcccactttgaatccggcagttccgttccaatcacctgtattacctcacccgacaggatagcacctatttttccgcacttttccaaagaatatccgcaagtcagcccatatagaaaacctgccgcaaaaaaatctccggcaccggtagtatcaaccactttcgccaccggcacagcctcaacacgtacttcttccgttcccttacgaatcagcgagccgcgcgctcccacctttacaatggcaatgctacacattttagcgataatatccaacgcttcctcaggttctttaccggtaaacgccttcgcctcttcctcattggcaaaaacaatatccacatatttatttaccagcaaagagaagaactcatggtcgcctgccacgatgttataacttgccatatccagacaaacctgcaaaccggcttctttggccaactcaatagcccggagaatcatatcgtgttcctgtaccagataaccctctataaacagataagtatatcccttgaacatctccagcgacagttcttccgctttcaacgtagacgctgctcccaaatatgtgccgaacgtgcgctctccgtccggagatataaaagtagacgccactcccgaaggcaatgtatctgaaactaataaatcagcttccgttccatgcttcagcaaactttcccgaaaaaagttaccataagaatcattatttatctttccgatgaacccggttcccgctccaagctgcgccatgccacggattgcatttccggcagagccaccggtagccaaatgagttttcatacggctaaattcttcattgattttcagtaacttatcttcatctataagcgtcatactgcccttgggcaagtccattttagttaagatttcatcactgtcaagggttgctaacacatcgaccaatgcgtttcccaatccaattattttatccatttctgatattttttttgcaaagatattgcatatttcaaaatatcctattacttttgcagcgcatttgagaaaaaacaacattcttccttagctcagtcggttagagcatctgactgttaatcagagggtccttggttcaagtccaagaggaagagcgaaagaaaaacttaaatgcaacattcttccttagctcagtcggttagagcatctgactgttaatcagagggtccttggttcaagtccaagaggaagagcaaaaaggttcgtcattacggcggacctttttttgttggatatcccatttcctccagaggagccccccaaaaatgggtcaacgtaaaaacctgagggattcatagcttatgcataaattttcgccagtctgaacaggaagaaagctctgtcctttactcctctgaattgtgtgcggaactcctttatttttgcattgaacgattcggaagcagcgtttgttgaacgtctgtcaaagaagttgattatttcccggtaatgcatctgtacggaacgtgccactcttccgaaagcaagaaaccctgatttttccacctcgtcataccagcgggcaagatgcgtcaatgccgcatccttgtacctgcattggtggtatatcagtccgagcctcatggagaggtagtatgctttcttaatatcgggatactcccggaacaggatgccggcgcgtacgcgctgtgattccgtccacaaggattccttcttatataacaggtaaatgcttctcgaaagaagctgtttgcgtgaatcaccgttttcaaagaccggcgcatgatatatcttcccgcaggctttggcatgggcgatctgaacggattcttcgtccaaagcctcccaacgtgctttaacgcgcatatcctgaaccgcctcataagcgagtttctgcacatggaaacggtctgtgacgcggcgtgcggcgggaaaacagaggcgggcgatctgctccatgttcggagccatatccatggttatctccctgacctgaaagcgtctgcggcgggaaagacggagcagtacggaggtcacggtctttacatctgttcctttcacaacggcgataagactgcccgaacggccttttctctccttgtttatcaacacggtatataattctccgcgggaaaggcagacttcatccagtcccacataaacaccgatgttcttctcgaaaagaagccattcttcggcatgaggaagctgctcccaacagagataaccgctcaggtgattccggtattgccgctcgagcagttccccgtcgaccccgaacagcgttcccaacagcctgcagcccaccggcagcttatcaatataattcttttaaaaaagacgcaaattcatgcgtcatacggctaccaccggcaaccagtttccagtcacggctcacgtaacggttctcatccttgacaacccacctgcgccggcgcacgttcagaaaaagcttcttgccgcgtatggggaaatcctgaaccacaacaggttcgtaaaaacccttgctctcaactttcattcctgcgtattctttaggaacttcattcttttcttctaaataaatcactatttccgatgcgctttcctttacgtccgagatgatgaaataatccaatgtcccttcaggaagaaggagacggtagccgttgttgtccataagatttctgagttagttttatgcaaagataggatttttacaaatattacccctcaggtttttacattgacccccaaaaatgctttcaaccacactggggtgacctcttcaaaactgatggagttctgctccataaaatccttgatacgattcaacgtactttgatacacatgcgccgtacccatgcgctgttcttctttcaactgagagacagtcatagccatataggctgacaaatttgttttattcatatagtttctactttaaaagtgagccatataaatgcctaaagaacaaattagttcaaacgactattctgttaaaaaagtacacagattacaaactttaatacatatccggaagcttcccgttcttccgaaataccggaatttatcaaaaattcgcaacagcaagcgtcagcacgctgatacgtacaccttctacgtcccgaaacacatcggcacacgtagtaatggtagctccggtagtcagtacgtcgtccaccaacaagatatgctttccgacaaaacgttcgggatagcgaagatgaaagatgccgttcacattcttccaccgttcataggcagatttgcttgtctgcgtttccgtatgtttcttgcgcactacggaagcaacatccaaaggaatacccgtaaccgccgcaacccctttggccacacattcgctctggttatatccgcgcatccgctgcttgcggggatgcaaaggaacgggaactatgacatccacatcgcaaaagaactccgaaacagtcaattccgctgccataaaacgccccattgtctctcccaagtccttacggccgccatatttcaattgatgcagtatccggcggaaatcactgcccttatgataaaagaagtaagaggtagcgcgttccaaaggaagttttccccagaacatacgttccaccggattatccgcacaaagatgataatccgtacggggcaaatccatattgcatttcagacaaatagcctcctccccttcctgcagaggtgtgccgcacacaacacactgccggggaaagaataaatgaagaaaagataaaagccaggctttaagcgtattttccataaatttggttttcatgcccaaaggtagggacaaatcacctataaaaaagtctctcttccgatatcaaggtttcaaatagaccaccgttttgccgctaccatacttacgtatcatcccctccgcaaggtatcggttcaggtcggacactgcccgatgcttcaccaaacccgttatcgattcataatccgcccgtgtgatgcatccatatttatccaaatgcagcaatagtttttctttcctttcctcctcgcccatcaaggaacgggatacgtacggtgacgctttgcgttccagctccatcgtattgaaacggttacggaatttgctcccgagacgcaggttcacattctgaaaatgtaccgacggcgaacggatttctttcttgtcggtaacctgacggtcgcatttcagcgatacggagaaatagcccaactcgcccacttccaccgtccagccctcggacagccaactgtatagttcgtccgtaacagcctgcaaagttccgtcgagaatggcgggactgaaaccggtggccttagccaccaactcacggaatttatcggcggagattgttccccgtggcaggatacgggcatgcagacggggctcgttgcggttctcgcccaaagggtcgggagtctgatacaaatcatagtaagcactcatatgtaataaggtattagattggcactatcagccaatacgttcataaatagcaagataccgcaccgccaaccgtaatccgtcagacagatgtcacccttgcgttaaacagatgttgccctttcgttacacagttgtctgacgaaagggcaacggctgtttaacgcattagcattcgcagtcaaagataatgataaatccacaagaaacgaataaatcctgcaattcttctgcctgatacctaaaaatcacctgttgccgtttatcttacttttactgtacgcaaagtaaaaaacctgaggcaaaacagtaaacgaaagcacaaaacatatcaggatgccgcctacaatcatcactgccaacggcttttgcacttccgaacccattcctgtggagagagcggcaggaagcaatccggcagaacccattaatgaaatcatcagcacagcacgaagacggatgcgtacggcctcatctattgcaaaacctatattgcggctttgctgcaaaagcgatttcatcagtgccgtgagcaaaatagaattgatagacactattccaaacaagatgataaacccaatacccgccgaaataccgaacggaatgcctgccacccaaagcgaaataaatcccccgataaaagcatagggcatagtgcttgcggcaatcagcgtatctttgactgtgccgaagttcatatacaataaaaagagaatcagaagcaaaacggccggaacaactaccgcaagacgtttggtggctcgctgctggctttcaaattcgcctgcccattgtatcttgctgccttcaggcaaatgcaccaacctttcaactttggcttgcgcctcatctatggtcgacccgaggtccctgtcccgaatggaaaaacctatccccacataccggctgcttccttcacgataaataaacgcaggtcctgtcacaaacttaatgtccgcaatttccttgaggggaacctgcttgccatccattgtcggaataagaatatcacctattttctgctcatcgttgcggaactgctgttcaaaacggagcatcacgtcaaaggtacgctcattttcgtaaaacacagttgcagctttcccaccgatagccatttcgataaccgcctgggcatctgccatagacacggcatattgggccattttcgactcaaggggtttaatctgcaattccggcagaccgattgagcggaatacatttacatcctccacccctcggacacctttaatgactccggcaacactatcggcagcagcctccaatgtatacagatcattaccgaaaattttaatgaccaacgcactttttactccggcaacatactcttctacattgtcctgaataggctgcgaaaaagcaaaaataattcccggataaacagccaaagaatcttgcatctgctcaatcagcttctctttggacatcttgcgcttccactcggattcgggtttgagctcggcgtgaaactcaatgttgaaaaagcccgttgcatctgttccatcattgggacgccctgtctgtgtaagaataaaatccacttcctcaaaactttgcagtttggctttcatctctttggttagccgcacgctctcttcgagattgacactgttaggcaaagtggcgcgaacataaaccgctccctcgttcatactcggaataaattccgtgccccaaaacataaaccgaaacagggagataccgaataaaagtacgaatgcggcaacggttgctttcctatgacgcttagtgaagtaataaaacgaaatgagccatccctccaatgcctttgcagccttgttgttcctctctcttatcggtcttgagaacgacaccttgcacataacagggacataagtaagcgacaatagcaaagagccgagaagagcatacccaagcgtaaaagccagcggagaaaacatctttccttccactttctgaaacgagaaaatagggaacagcgccaccaccagaataatctgggcaaagaaaatatgagaagcaaccgaaccggcactcttctttataagcccgcttttggcataacggccgaaatactttcccctctcctgcgatttttgcaggagcgcaacgaaaaccacctctgttatcaccaacgtaccctccagcaacagcccgaaatccaaagcccccatcgaaatcagattggcgggcagcccttgtatccgaagcatcgtaattgcaaaaagaaacgacagagggatgactgaagccacaataaccgtggtacgccagttgaacagaaacaagaacacgataaatgacacaagcagaaccccctccagcatatttccgattacagtgtgcacagtagcatcgacaagccgagttctgtccataaagggcactatctttatatcctcaggcaaaattctgtcgttaagttctgtgattttatccttaagacgcgcgatgacttcgctcgggttctcaccacggagcattatcacgatgccttgtaccacatcatcatcgtaattgagcccaacctgcccttggcgcggttttgcagatacggataccgtggcaacttctttaacccgaatcggcgaactgcctttggtggtaatcaataggttttcaatatcctcaacgctttccaatagtcccaaaccacggaccacataggcttgcgcccccttctgtattacatcgccgcccacattgatattgcttctccctacagcctcataaacatcaagaggagaaatatcgtaattggcaagttccaccggatttacacgaatttcgtacattttctcctcgccgccgaaagtagcaatcgttgcaatgcccggcacagccaaaagctcccgttgcactacccagtcgttaacggccgaaacctcgcggatgggcaggtcactcttaagtatgtatctgaagatttccccggtggctccacttggcggttcaattgaaagttccacgccatccggcaggctcaactcctgtatacggttcgaagcatactgctgagcataaaaatcatctacaccgtcctcaaatagtacattgacaaccgccagcccgaataaggatgtggagcgcacatccgttttccgaggaatggtattaagctgttgcattatgggaagcgtaacgaacttctctacctcttcggcactgcgtccgggccattgggcaatgattttcgcccgcgtattggtcacatcgggataagcctcaatgggagtattctggtagcaggcaattcccgccacaaacagaactcccgtcataaaaaggataaacacatgattcttaagggaaaatcctatgatgttttctatgaacttatgcatcgttacttcccttttatttcgttatacatcagcagttggttctttataacgacctcttcacccgccttaattccttcggtaatataggtaaagtcattatgccgggcgaaaggggtgatcttccgaatcccgaaagtcttatcgccaacaactacatagtaaccgttattgtcgaaaatcaccgcactgctcggaaccgctaccagttccaaattcgaatcattgaacaattttaccaccacaggcatttccggtttaagcttcaatgccgggttaggcaatgtgattcgcaccttcaatgctttgtcctcggagtcgaaaacctgtgagaggaaatctatcttacccttgaaaacctctgctggataggccacggatgtaatttcaacgcattgcccctcgtgtacaaattgcaaatttccggcatagacattcgctacaacccacactgtcgataaatcggccatcgaaaacagcggtccgccactttccgggaaagaggttcccggattgcagtatttcccgattacatagccgctcatcggggcttttacggaaaagacgccgttatcctgattttcgccataaagaacaaaatctgactgcaacttcccgactgtcgaacgagcttcgacaagctctttatcggttgccatcccgctctcgtgcaaggactccacacctttaagattctgtcgggccacggcaagttccgattgcaaagaactcaattcgaccgaacgtatatctaccatccttttacctttttctgcataatcgccaagtgaaaagtagcttttcacgactacaccgcttactaaaggtgaatagcttatcgtacggtcggaatcaacaactacttttccggcaagggtaaactccttctgcaaccgcttcaactcggcttttgctgtcagcacttcctgcaaaaaaacgtccgaaacggtttcccgggtcggcagactgctccggctgttctctccgcagcttgccagcaacggtagtaaaagataaattattctcttcatcattcgttattttatagtttgtcctattgcaaattgtaagcgttcaaattgaagcctcagctctttccggctccgcaacaacacctctttcgaagcatgatagctatccatgaaatccatatactcaaccatcgatatatttttcatcaacagattctttgtatacacatccggcatcttgtccatctcgctttgtatggaacgattcacaccgttctcctcaagaaaagagtaaacggctttgtaattttccaggcattcaataatttcattccgtatattattccgttcctgcaacaccaaaatttcattctgcctaagtctgaaccgtgcactccttatagctcctttattacgattgaaaaccggtaattgcactcctattcccacaccgaagaagttatcccacacgcctccggcacggtcatactttactcccaagctaatgtcgggtatcgccaatgccttttgataaacgatatctttacggtgatattcagcccgcagtactgccgcagccaaatcgggacgggatgccaaagccgtttccataagcatggcaggatccaatgtaagaggagatggaaagtcaacctgctcctcggcaacgatcaccacgaccgaaggttccaaagcaagcaaattctttatgttcttttgatgtgcattatactcggtccgtacctcgttcatttctccgtttactgcaaacagcgccgtttgcagcctcaacagttcatttccggttacattccccgtttgatactgcgcccgatatccggcaacaaccttttcgagaagagtctgccgactctcgataaccttaagcagattttgtagatatacaagctcggctatcgagatatgaagttccattttcagacttcgcaacagctcttcaaactgccttacggttatctccttatctattttttcaacttccgccaactttatcctgcgcgccgaaagcgaaaccatctgagagagttcgagcgaaaactgcttgggactggcaaccgcgcctccgtactcatcagtcccccgcctcttccaaaagttgatatcaccgacggataattccggattgtcccaaactgttgcttcggcaatggcagcatcggctatcgaaacattcatccgttcggcaataagtgccaagttctgtttcagaaacatagcctctatctggtcggaagacaatctaatttgccgagccggtacagatacaccaataaaagagataaaaactatgagcagcaaacgtatcataaacattgttttttgcgggcaaaaatagccataagcatagtcttacatcattagaaaacacttataaatcaattagaaaatcattagaaacccatctcttacaaaaaaatcatctacctttgcaacatatggctaaaatacttgttatagaagatgaaaaccgtatggccgaattgctcaaacgcggtttggaagagtctggacacacggttggcacggcaaccaatgtatcggaagggttgagaatgtttgcctacgaaaaacaggatatcatcatttcagacataatgctgcccgacggcagtgggtttgatttatgccgcgatatccgacggcaaaacgaaactgtgcctatactgatacttaccgcactcggtacgacagacgacaaactcgaaggattcgattcgggagcggatgactatatggtcaaaccttttgacttccgagaactgaatgcacgcatatcaatcctactgaagcgctgccaaatacccacagtagagtgcatagagtatgcagacctcaaggtatatctcaggacaaagtccgtttcgcgaaacggacagtccattatacttacaccgaaagaatacaacttactcctcttttttgtccaaaacccggaaagaattctaacccgtaccgaaatagccgaaaaggtatgggacacccattttgataccggaacaaacttcatcgatgtttatataaactatttgcgaaaaaagatagacaaaaatttcaacaccaaactaatccataccaaaccgggaatgggattcatattcagctatgaaaatccgtactaaactaacgctccgatatctgtttgttacggcattacttgtaatcgccgtcttctttgtgctcgaagaattgctctttccacaagcaggctacgatatgctccatattctaaatacacgcctgcttgcggtatgggcggtttcattcgggttgttgtttgtcatcggctatttcatggcacgcagcgtactaaaaccagtatcggaaattgtaaaacaagttgaagccatcaccgcttccaatctcagcaagcgtgtggaagtagaagaccacaaagacgaaataggagaacttgcccgaacgttcaacaaaacgctggaccgccttgaagaatcatttgaagcccaaaagatgtttatcagtaatgtttcgcacgaactgcggactccaatggctgcactgattgccgaactcgaactttctctttacaaagagcgctcaagcgaagattataaaaaagtggttgaaaatgcgctttccgatgcccgtaatattgagaaactatccaacggactaatggatttggcaaaggcaagctacaatacagaacaaataagcatgtcggcaatacgtcttgacgaagtgctattggatgccagtgccatggtgatgaaagcccacagcggctataatgttgacttaaggtttgaagacgataccgaagatgacggaatggtcactattcgtggtaacgactatctgcttcggacagcatttgtaaaccttatcgaaaataattgcaagttctcatctgaccaaagttcaacggtacagatttcgttttccaaacataaggtacttatccgtttctccgataccggcatcggcattcccgaagaagatatggagcatctgttcgaacctttttacagaggcaggaaccgggatttctcacaaggaaacggtattggaatggcattggtagagagaataatcaaacttcacaaaggtgcaatttccgtttattcacaccatgacaaaggtacggtattcacccttattttcgattatcttcagtctgactgaatctgtatttgcactgcatgatattaataatgtcccagcatatatcatttatgttcaaaaatgcaggaataggtatattttgtccgtcaaaaggcaagacagataataatttttgccttacatttacaatgggttaaacacggttatccccaccggaacggatggaagaacaactacttattaatataccaaacaaaaaaacatgaaaaaaagtatcctatttatcacgagttttttcctctgtgttttctgtctgaaaagtaatgcgcaacaaagcaggccagaggttacctgggagaatatggaaggcgtcacagtacccattccgccacaagtacacccccggctttatgtacgctccgccgatttgcccggtttaaagaaacgcatggaacacccgcatgtcaaggaagttctggctaccctgaacaaattgggcaaagaccgtactcccgaagaagaagcaaaagtcaaggacagaggattccgctactactttgaaatgcgtggcgtgaccagccgcgtacaggtgcaggcactcgactatctggtgtatggcgacaagaaacaggccagaagcgccattaccgccatgctggacacgcttcagaacgtcaattacggaacaaaaggcgatttgtcgcgtgccagcggtgtgatgctcacctgcggtgcaatggtatatgactggtgctacgaccagatgaaagaatccgaaaagaaagcttacatagaatctttcacccgcatagccaaaacaatggaatgcggctatcccccacgcaacaacgaaccgattgccgggcattccagcgaatggatgatactgcgggacatgctttctgccggcattgccatctacgatgaatatccggacatgtacaaccatgtaataaagatgatgttcaaggattatctgcctgtgcgaaactacatctactccgggcataactaccatcagggaacgagctacgtaaatgtacgtttcagcaacgacctcttctcgctctggattctgcaacgcatgggcgcaggagccatatacaacccggcgcagcagtttgtcctgtacgacttcctctaccgccgccgtcccgacgggcaggtgatgccggccggcgatacaaatcccatcagaaaaaacatgccgtcctactcactgcctgccatgctggcttccagcttctacaaagacagctatctggcatacgagtacgaacgcaaacccaacatcgaacgccactgcctcatcttcgacattctgtggagagacttggatttgaaggccaaagctcccgatgacctgccgctgacacgctattcgggaagtcctttcggctggatgatagcccgcacggcatgggacgaaaacagcgtgattgccgaaatgaagataaacgaacagtttgtcggcaaccaccagcacttggacggcggctctttccagctctattacaaaggtccccttgccatcgacgcgggagcctatcagggaagttccggcggatacaacagcccgcacaacaagaatttcttcaaacgtaccatcgcacataattcgctgctggtatataaccccgatgaaaaattcgcctgctggaactatggcggaggcggcaagaccgaatttgcaaccaatgacggcggacaacgcatgcccggcgaccgctgggaaacctgccgctcgttcgagcaattgctaagcaaagactacacaaccggcaaagccctggcgcacggattcgggcctgatgcctgcaaacccgactactcctatctgaaaggcgacatcacgcaagcctacacggataaagtaaaagaggcgaaacgctctttcgtcttcctgaacctgcacactgccgaagtgcccgccgcacttatcgtatttgacaaagttgtgtcttccgaccccacattcaagaaattctggctgctgcacagcattgaagaacctacgatagaaggcaaccgtttcattgtccggcgcaccaaaaacggtgataccggaatgttgcagaaccatgtattattgcccgaagccggaaatgcacagatagaaaaggtgggcggcaaaggaaaagaattctgggtattcggaaccaactacccgaacgacgcactgcccaaccgccccgatgatgccaacgaacggggagcatggcgtgtggaagtgtcgcctgccgcacctgccaccgaagactgcttcctgaacgtaatgcaggttgcggacaacacctgcaaacggatgcacgacgtaaaacgcattgatgcggagaaagtggtaggcgtacagatagccgaccgggtcgttaccttcagcagagacagccagcctctgtccggcaaagtcgatatgaaagtagacggaaacgctgccatgaaatttgttatcaccgacctcattccgggaacatggcaaataaagaaagacgggaaggtatatatccccgccatggaagtacgttcggacgacggcatcctttcttttgaaggcactgccggtcattacgaatttctgcgctaaacggatattctaaataatctgcctggctatccaggcacaggcttctgcatcggccagcgcatggtgatgttgctctaaccggtaaccgcaccatgccgctaccgtatgcagctgataatcgggcagtcccttaatggcacggcgtgatgcctgcaaagtacaacggaaatcataatcgggataatccatgccgtacatgcggaataccgctttcaggcaactctcatcgaacgctttattatgcgccactaacgtcagtccctcgatgcgtggtgctatttcctgccatacggccggaaagacaggcgaccgggacgtatccgccagggtcagaccgtgcacacgggtattccaataagtataatactccggttcgggacgaatcagactgtaatagctgtctgcaatttctccattccgcacaatgactacaccgacactgcatacactggtgcgctgttcattggccgtttcaaaatctatagcggcaaaattctccatgaagcgattcttttacgatatttccaaaatattttaaaaaagtttcaatcaactgtaaaccaaaatattaaatagccgtttatagggttttccgagcacagggaaagtaccgaaagcgcttttaaagcacccgtccgttccggcatgttgtaacttcgcactgtgatcacaaagatatatgatttcgaagtaacaaccatctaaaacaaaaaagattatggcattccgttatgtagttaaaaagagagttttcggtttcgatgaaagtaagtcggaaaagtatgtagccgcttcgttctccattggagaaatcagctacgacagattgtgcgaccaggttacgaaggagggtatggctccacgcggcgttgtaaaaatggttatggacggactgattgatgcgctcagcacttacgtcagtctcggagcgaccgtgaaattaggagatttcggcactatccgcccgggactgaactgcaaaagccagagcgaggcaaaagatgtaaccgccgacagcatctaccggcagaaactgatcctcactccgggaaaaaggctgaaagatatggtaaagagctccggaataacgcgtatctcgaccaacggcgaggagattgctacaagtggcggcagtaacggcggcagtggcaatggcggagaggaagaaaatccgctgggataaaacctgcaggctgacttaaaaaacaacctgtctataactgaggctgcatcgtatgaacagagtatcatacggtgcagcctttttatatgaatagattttactatctttgcctactgcaaccagtaaagctttaaaatatggaacatcctctttctcaattcagatattgtccgaaatgcggttcggagcatttcgaaattcataatgaaaaatcaaaacaatgcaaggattgcggttttgtctactatttcaactcctccgccgctaccgtcgccctgatattgaacggacggaacgaattattggtgtgccgccgcgccaaagaaccggccaaagggacactcgatttaccgggcggcttcatagacatggcggaaaccggtgaagaaggcgttgcgcgcgaagtgaaagaagaaacgggaatgacagtgacacaagccgaatacctgttttcattaccgaacatctatatctattcgggatttcccgtgcatacgctggacctgtttttccgctgtacggtagccgataccctgcatttcgaagcaatggacgatgcggcggaagtcttcttccttccgctgaaagacatccacccggaagatttcgggctgggctccatccgtaaaggcctgcaaatgttcctggcgggtatatcctaaaaaagccaaacaagtggaacatattcaaaccaaaacccgtatttttgtaaaaaagccctattctataaccaccgaagatgaaacataaaatttatcgcatagtatgcaccgcgctttgctgcgcacctttgctcgccacggcacagacgggcgggaaaatcacttcgccgcaacagctgtatgaggaaggagaaagtctgttccggcaaaaggcatttgccgcagccatgcctcccctacaggcttttataaaacaaaccgatgcggaaggcgccccggtatccgctgccggcaacaaagaagaagccgaatacatgctggtatgcgccgaatatgaactaagaacccccaatagcatagagttgttgcgggagtatctcgatacgtatcccgacactccccacgccaaccgtatctgcgccctcatagcgtccgcctatttcttcgagggaaaatatgacgatgcactcgccatgttcaattcatcccggctcgacctcctgagcaatgaagaacgggatgacatgacctaccgcctggcaacctgttacctgaaaaccggaaatgtgaaagaagccgccatctggttcgagacattgcgaagcaccggttccagatatacagcagactgtacgtactaccttgcatatatccgctactcacagcaacggtacgacgatgccctcaacggcttcctcagcctgcaggagaatgcaaaatacgaggcgctcgtaccttattacatcgcggaaatatatctgattaaaaagaattatgacaaagcggaaattgttgcgcaaaactatctctcggcttaccccaaccagaaatatacgggagagatgtaccgcatacaaggtacagccgattatcatttcggcgagtaccatgaagcaataaaagctttcggcagctatctgaaagacaacgcggagcctgccccaagaagagatgcgctttatatgctgggaatgtcctactaccggacgggtgtctactcgcaagttccggttaccctgggcgaggtgactgcaaacaaagatgcgcttacacaaaacgcatatctgcacatgggattggcttacttgcagcttgccgacaagaacaaggcgcgtatggcatttgaacaggccgccgcatccgatgccgatttgaaaataaaggaacaggcatcctacaataacgctctctgcattcacgaaacatcctactctgctttcggcgagtcggttacggtattcgagaacttcctgaatgagtttcccaactccgcatacgccgataaagtaagcagctacctgatagaggtgtatatgaacacgcgcagctacgatgccgcactcaagtccattgaacgcattacgcatcccggcagagccattttggaagccaagcagaagattctgttccagttgggtacccaatcctttgccaatacccagtttgagcaggcaatcggctgcttcaaccaaagcattgccttaggcgggtataacctgcaaacaaaggccgatgccctttattggcgaggtgaatcctattaccggctgaaccgcatgcaggaagccgcccgtaattttaacgattatctgtcccttaccccacagaagaatacggaaatgtatgcccttgcctactacaatctggcatacatagctttccataagaaagattatgcaacggcgcaagaccgtttcctgaaattcatccaactgagaaaggccggagacgcaaccgttcttgccgatgcgtacaaccgtgtcggcgactgctacatgcaggtccgccgcttcgacgaagccaaacagtactatacccgggcagaaaatctgggtacgcccgccggtgactactcctactatcaactggctctggtgtcgggtctgcaaaaagactacgatggaaagattacgctgctgaaccggctggccgacaaatatccgaattcgccctatgccgtcagtgcactttacgaaaaaggccgttcgtatgtgcagggccgcaataacagtcaggccatcgtaaccttccgggaactgctgaacaaatatcccgaaagccccgtcagtcgtaaggctgccgccgaaatcggactgctgtactatcagaatgatgattacaaccgcgccatcgaagcctataaatacgttatcacccaatatccgggcagcgaagaagcacgtcttgccatgcgcgatttgaaatccatttatgtggaagccaaccgcgtggatgagtttgctgcgcttgccgcccaaatgccgggtgctatccgctttgaacccaatgagcaggattcgctgacctatattgccgcggaaaaggtgtatatgaaaggggaaatcatccctgcaagggaaagcttcacccgttacctgcaaagctatccgaacggagctttcagcctgaacgcacattactatctgagcctcatcggaaaagaacagaaagatgaaaccggtgtattggagcataccggcaaactgttggagtatccggacagcccgtattcggaagaggccctgctgatgcacggagaaatcctgttcaaccgcaaggagtacaaacaggctctggcagactacaagcaactgcaaacccgcgccacaaccgccgaacgccggcagctgggcgtcaccggcgtattgcgatgcggtgtgctcttgaaggatgacatagaagtgattcaggccgcaaccgctttattggccgaagccaaactgactcccgaactgcaaaatgaagccttatactaccgcgtcaaagcctatctgaaccagaaagcggtgaaaaaggcggcagacgacctcaaacttctggcaaaagacacccgtacattatacggtgcggaagccaaatatctgtcggcacagttgatgtacaatgccggtgagtatgccgcagccgaaaaggaaatactgaacttcatcgaccagagcaccccgcacgcctactggctggcacgcagctttatccttctgtccgatgtatatgtcgctatggataagaaactggatgcacgccaatatctgctgagcttgcaacaaaactatcatgccgatgatgatatcgaacgtatgattcaagaaagactggaaaagctgaaataaaagaatgcaatgaatatgagaaaaatacaatatatcctcagcggaataacgctgataaccctacctttgggcatccatgcccagcaacaggccaaagactccaccgtaaaccgtacggttgttgtggaacaggaatatacccccgatattccggatgcgtccaaaataaacgtgctcccccaagtggaagcaccgactgccaataaaaaggctgtggaatacgatgtaactctcgtgcctgccaacaccatacctgcaactgtcatgcaggcatataccggcaaggagacgcaagccgaaacacatcccggatatatccgtttgggttatggcaactacggcaatctggacgcacgcgccggctatctgttcacattgtccggccgcgaccgcctcaacctgaatttccggatgaacggcatggacggcaaactcgatttacccgacaatgacggcaaatggaattcctactactatcgcactcatgccaatatggattatgtgcaccgcttcaggaaagcagacctgaacgttgcgggcaacttcggattgagcaacttcaatttcctgcccgatgcagccgtcagaaaacagaagttcatttccggtgacattcatttcggagtgaaatccacggatacggaactgcccctccggttcagtgccgaaacaaacctgatgctttacgaacgtcaatacgattccggtttcttgaacagccgggaatacatcgtccgcaccaaagcactggtcacaggcggcatatcagacgaacagaccgtaggcatcggctttgcaatggacaatgtgctgtacaagaacaatcattttgagaactacacctctctcggtctgaacccgcattaccgcttggaaaacgatgattggaaaatacgtatcggcgccctggtggacatgaccttcggtttcggaaagaaattccgggcagcccccgatgtagcagtggaatacaacttctcggacagttatatcctctatgcacaggccaaaggcgggagactgcaaaatgacttccgccgtttagaaacattctgcccatacggacaggtttcttcacaaccggatgccacttatgaacaaataaatgccgccatcggcttcaaagccagtccggcaatcggcttatggctgaatctgtacggcggatatcagaacttaaaggatgatttgtttttccaaccggcagatttcgaatccgctgccaatgagtacagtccgatgctttccatcggccaatggaacacaagcaacatctacgccggcgccgagatacgctacagctataagaacatattttcattctccgctaccggagtttaccgcaattgggatgcaaaggacgacagccagtccaatgccggcgcctatgccctcgtttacaaaccggcctttgaagctgatttgcacatagatgtgcatcccgtatccgctttactgcttaacctcggctacaggcatatttcgcgcgagaaggtggaaggaaacaaagtcgatgcggtcaacaacctctatgccggcggcagctacgaattctttaaaggcatatccgtttacgcccgcataaacaatttattaaaccaggattatcaatattattggggataccccaccgaaggcatcaactttaccggaggtgtaagttttaaattctaatagccaaaatcaaagatataaccaacaaaataggtcatttttgctaaattctccttatattataaggtggaaagtttgttttttcctacttttgcgggcaaattagtggctggagtcactataaaacagaaatttatgcagaaaaaccttgtcattgtcgagtctccggcaaaagctaagactatcgagaaattcctcgggaaagactataaagtcctttccagttacgggcatatacgcgatttgaagaaaaaagagttcagtattgatattgataaagatttcaaaccgcattatgaaattcctggagataagaaaaaggttgtagaagagttgaaagccgaagccaaggaagcggaaaccgtatggttggcatccgatgaggaccgcgagggagaagcgattgcatggcatttatacgaagtgctgaaactgcaaccggagcataccaagcgtatcgttttccacgaaatcacccaaagcgccattctgaaagccatcgagcaaccgcgcaatatcgacatcaatctggtagatgcccaacaggcgcgccgtattctggaccgtatcgtaggttttgaactttcacccgtattgtggaaaaaagtgaaacccgcactctctgccgggcgtgtgcaatcggtagcagtccgccttatcgtagaacgcgagcgcgagatacaggctttccaatcggaagcatcgtatcgggtgaccgccgtattcctcgtgcccgatgccgacggcaaaccggtggaaatgaaagccgagctgtcgcgccgtatcaagaccaaagccgaagctcaaaaatttctggaaagctgccggtcagcctctttcaccatccatgacatttctacccggccactgaaaaaaagccctgccgctcctttcactacatctactttgcagcaggaagctgcccgcaaattaggatttacagtagcacagaccatgatggtagcccagcggttgtacgaatcgggaaagataacctatatgcgtaccgactccgtcaacctgtccgaactggcggttgacagcagcaaagcggtcattgccgacatgatgggagagcgctatgtatatccgcgtcatttcgccaccaaaaccaaaggcgctcaagaggctcacgaagccattcgccctacgtatatggaaaatgccaagatagaaggtactccgcaggaaagaaaactgtacgacctgatatggaagcgcacgatagcctctcaaatggcagatgcggaagttgagaaaacgaccgtaagcatcggcatcagcaacgaagcggatacgttcaatgcaaccggagaggttgtaaaattcgacggtttcctccacgtgtatcgcgagtctatcgacgaagacacggagcaggaggatgaaacccgtctgctgccccctttgaagaaaggacaagtcttacatcaccagagcattattgctacggaacgcttcacgcaacatccgccccgttacaccgaagccagccttgtacgcaaattggaagaactgggtatcggccgtccttccacatacgcccctaccatttcaaccatacagcaacgcggctatgtggagaaaggcgaaaagagcggggaagagcgctcttacaacatactttcattgcaggacagcaagattacggacgttacgcaaacagaaattacaggagccgaaaaagccaaattgatgcctaccgatacaggtacggtagtcaatgatttcctgatggaatatttccccaacatcctcgactataactttactgccagcgttgaaaagcagttcgatgagatagccgaaggagaaaagaagtggaccgccatcctgaaggatttctataaagatttccacccgtccgtggaaaacacgcttgccaccaagaatgcccacaaggccggcgaacgtatcttaggcgaagaaccgggcagcggcaaacaggtatccgtaaaaatcggccgtttcggtcccgttgtacaaatcggtactgccggagacaacgaaaagccacgctttgcccaactcaagaaagatatgtccattgagacaataacattggaagaagctttggaactgttcaagcttccccgcaccctgggcgaatatgaaggcaagacagtaaccataggaaccggccgctacggaccttatgtacacaacaacggaatgtatacctcacttccgaagacaatagatccgctggaaataacattggcagaagctattcagctcatccaggaaaagaaagatgccgaagcccagaaacatatcaagaaatttgaagaagaaccggagctggaaatattgaacggccgttacggaccgtatatttcttataaaggcagcaactacaaaatcccgaaggacattatcccgcaggatttaaacctggatgcatgcagggaaatcatcaaactgcagagcgaccccgatgcaccgaaagccaaacgcggcaaatacgccaagaagaaaaagtaaagaagccataaaaaaagaaagccctctccgcaaattgcaaagagggctttttcatatgataaaatatctcgattacattctgtcgggaacctcaatgccaagcaatcccattcccaaacgtaccaccttggctacattctcggacaaggcaagacggaatatcttcacagcctcattctcctcacgcaatatgctgaagtcatgatagaactggttgtattccttcacgaggtcgtaagtatagttagcaatcaaagaagggctataatcctcacccgcctgcttcacaatagcggcaaagtctgcaaccatctgtatcaggccttcctctttctcactcaattcaataccggccggaagttgtgcaggaacggaaatacctgcttctttcgctttacggagaaccgactggatacgggcatacgtgtactggatgaaaggtcctgtattaccattgaaatcgatggattccttcggattgaacgtcatattcttgcgagcatccaccttcaatatgaaatatttcaatgcgcctaaaccgacaatgcgtgcaatattatcagcctcctcttgggtcagaccatccagcttgcccaattctccggaagtttccttagcggtattaatcatttcagccattaagtcatcggcatccacaaccgtaccctcacggctcttcatcttaccttcgggcaattccaccataccgtaggagaagtgaaccaaccctttgccccattcgaagcccagcttatcaagcagaatggaaagcacctggaaatggtagttctgctcgttgcctaccacataaaccatcttgtcaatggggaaatcggcaaagcgcaatttggccgtacctatatcctgggtcatataaacagaagtgccgtcggcacggagaagcaatttgtggtcgagcccctctccggtcaggtcggcccatacggaaccgtcttctttgcggtagaagaagcctttctccaaaccttccataaccttctccttgccctccagataagtttccgactcgtagtaaatcttgtcgaacgtaacgcccatcatacggtaggtctcatcgaagcctgcatatacccaatcattcatcttcttccacagagtacggacctcagggtcgccggcttcccacttcaccagcatctcacgcgcttctttcatcaagggagattccgcttcggcttttgccttggcctcttcttcgctcatgccttcactctggaacttcgccatcagctcttttacctcagccttataatgcttgtcgaaagccacataatagtcacctatcaaatggtcgcctttcttgccggacgattcgggagtttcaccgttaccgtacttctgccaagccaacattgacttacagatatgaataccgcggtcgttcactatatttgtcttaaccaccctgttgccattggccgagatgatatttgccaacgcgtttcccaacagattattacggacatgtcccaaatggagcggcttattcgtattgggcgaagaatactcaatcatcaccagcggagagttatcggttgcagcaacaatgccgtactttgcatccgcatgaattccattcagcaactcaatccatgccgaagaagcgattgtcaggttcaaaaagcccttgataacattgaatgccgataccgacggctcgtttgcctgcagatattcgccaatctcctgtgcggtctgctccggtccttttttagacatacggagaaaagggaaaacgaccagggtaaggtgtccctcaaattctttcttggttttctgcaactgtatctgtgcagccggaacatcctgaccgtacagcgctttcagtccgctcattacggacgctaccaatttctgttctatattcatgattcaaatgtattttctgcgtacaaagatacgaactatttttaattccataaaaaaggagacgttgtatgcgcctccttttctcaagttttatttatgattgattttattcgatagtcaattccgaacccggtttgaacttagcgacttttttcgcctcaatctgaataggtttctttgttgccggattgatgccaatgcgtccggctctctccattacagaaaaagtgccaaagccaaccaatgcgactttatcacctgcctttaatgcttttgttaccgatgcaataaatgcatccaatgctctttttgaatcggcctttgacaaaccgccttccgctgccattgcgctaataagttctgacttattcataatacgaatgattaattaattgttacacaaaagaaaaattccaatgctacttcctacaaaaatagagcaaaaattctgaatatcaaataaaaacattaaaaaaagggcggaaaacagagaaaaagaaagaataggagttcctttttctgttatagaacagaatttattcgtatttttgccaaataaagcgaaaaaaacagattatgaatactataccgacagtaaccaaaaaccttttaatcatcaatgtactgatgtttctcggcacaattgtggcacagagttacggcattgatttaaacaactacctgggactgcactttttccttgccggagatttcaatgcagcacagttgattacttatatgttcatgcacggcggatttacccatctgttcttcaacatgtttgccgtttggatgttcggccgtatactcgagcaggtctggggaccgaaacgcttcctgttctactacctcgcatgcggcatcggtgcagggcttatccaggagcttgtacaatacatccattacgaaacggtgctttccgcatacgacagtgtcaataccgggtattccatcatccccatggaagaatatctcaacatgatgactaccgtcggagcctccggggccgtatatgccatcttgctgggattcggcatgctgtttcccaaccaaccgatgttcgtctttccgctaccgtttcccatcaaagccaagtatttcgttatcggatatgccttgatagaattattctcgggacttgccaacaatccgggcgacaatgtggcgcactttgcacatttgggcggtatgatattcggattcattctaataatgtactggagaaaaaaggacagaggaaatggctactattataactgatttaaaggaatcgttccgtagaggaaacatctacatccaactgatttatatcaatgtaggagtatttatcttcactacactgacaggagtcatattgcagctcttcaaccggagcctcggcggagtgttcgaatggctggaactgcccgcttcactgccccgcttcatcatccagccctggtctgtcctgacgtatatgtttatgcacgcaggagtcctgcatattcttttcaatatgctttggctgtattggttcggtgccttgttcctgaactttttctctgccagacatttacggggagtatacatcttaggcggaatctgcggcggactgctttatatgacggcctacaacatcttcccttatttccgtccgatgacggaatactctttcatgctgggagcatcggcatccgtactcgctatcgtagcggctaccgcctatcgggaacctgactacccgatacgccttttcctttttggaaccgtacgcctgaaatatctggcattgattgttatcgtaacagacctgttgtttatcacatccagcaatgccggcggacatatcgcccatttaggcggagcgttggcaggtctgtggtttgcagccagccttagcaaaggcgcggatatcactgcatggattaacaagtctctggacgctgtcactgccttgttcagcttcaagccccgcaagcccaagatgaaggtccattatggaaccgaaagacagaaagattataactataacgcccgaaaaaaagctcaatccgatgaaatagaccgtatcctcgacaaattgaagaagtccggatatgaaagtctcacaacggaagaaaagaagagcttgttcgatgcaagtaaacgataatgtatgtatgaagcatttcggtaattttgtcgccctgctgattgtagcggtcaatgctttattcacgggtcttttgctgttggtggcatacagtccttacatccaaccggcaacgcatccggtacaatcctgtctcggactgacctttccggtctttgcacttatcaacggcggctttctgattttctggctggttatacaacgatacaagacagctttgctaccgttgaccggccttctgctatgctactcgcagctacggacctatctgccccttaattttcacaccaccgagcttcccgaaggcagcataaagctcctgtcttacaacattatgggttttgacggtgcttacaaaaaagacgggaagaatccgatactcacctatctgaaagagagcaatgccgacatcctatgcctgcaggaatatgcatccgacgaatctccccgccacctcacgcagagagacatcgaacgggaattgaaagattatccctaccgccgcatcaacgtcgtaggcagcggcagcggctataccaacaggatagcatgttactccagatttcccattctatccgcacgtgtcctggactatgcaagcagctacaacggttccgtactgtatgaactcaaactgaatgaagatacgattacccttatcaacaaccatttggagtccaacaaactgacaaaggccgataaagacatttacgaagaaatattgaaagctcccgaaacggaaaaagtgaaaagcggcgcacggctgttgctgcataaactggcggaagcatccgccatccgtgccccgcaggcagacaccattgcacgggagatagcatcttcccggcatccgtctgtcatcgtctgcggagatttcaacgacactcccatttcatacgcccaccgcgtcatagcgcaaaatctggatgacgctttcacccagtcgggacgcggactgggaatctcctacaaccagaacaaattctattttaggatagacaacatattaatcagcaagaacctgcggtcgtacaactgtacagtagaccgttccataagagagtccgatcactatccgatatggtgctacatagccaaacggcaatgacgttccctgccaagatgaaattatcaataaactactcattatctaatactctgactttatgtttaaaagaagtattctaattttagctgcaagttgtatgatgtactcctgtgccaaccaaacggaaagcaatccgttcctcaccgagtttcaaaccccgaacggtgttccgcctttcgacaaaatcaggctggaacactacgaaccggcattccttcagggaatagaagagcaaaatgccaatatccgggctattgtcgacaataccgaagcgccggattttgaaaatgtaatcgttgcttttgacaacagttcacccatactcaaccgggtaagcgccatcttcttcaacatgacggatgccgagaccagtgacgccctgaacgaactttccataaagctcgctccggtactgtccgaacatggagacaatatatcgcttaaccaggcgctattcaataaagtacaggccgtttaccagaaaaaggattcgttaaacctgaccaccgaacaacaaagacttctggacaaaacatacaaagacttcgtacgttccggcgccaatctttctgccgaaaagcaagcccgcctgcgcgagataaacaagcagctctccacgctgggcatcactttcagcaacaatatcctgaacgaaaacaatgagttcatgctctttgtagacaaacaggaagaccttgccgggcttcccgaatggttccgccaaagcgctgccgaagaagcaaaagctgccggacaggaaggcaaatggctgtttacgctgcacaacgccagccgtctcccgttcctgcaatattcagccaaccgtccgttgcgcgagaaaatatacaaagcttacatcaaccgcggcaacaacaacgacaagaacgataacaagaaaatcattaccgacatcgtcagtctgcgtctcgaaaaagcccgcctgttaggcttcgactgctattccaacttcgtactggacaatacgatggcaaagaattcggccacagtaatggagttcctgaacaacctgtggaattatgccctgcctaaagccaaggccgaagctgccgaactccagaagctgatggacaaagaaggcaaaggcgagaagctggaagcctgggactggtggtattataccgagaagctccgcaaagaaaaatatgacctcgaagaggaccagatcaaaccctacttcaaattggagaacgtacgcgaaggcgcttttgccgttgccaacaaactctatggcattacgctgacaaaactcaacaatatccctgtctatcatcccgatgtagaagtcttcgaggtaaaagatgcagacggctcgcaactgggcatcttctacgtagactacttcccgcgtcccggcaagagcggcggagcatggatgagcaactaccgcgaacagaaaggcgacatccgtccgttggtatgcaacgtagccagcttcaccaaacccgttggcgataccccctccctgctcacaatggatgaagtggaaacccttttccatgaattcggccacggactgcacggactgctgaccaaatgcaactacctgggcgtctccggcacgaatgtagtgcgcgatttcgtagaacttccgtcacaaatcaacgaacattgggccactgaacccgaggtattgaagatgtacgccagacattaccagaccggcgaagtcatccccgacagcctcatcgaaaagatactgaaacaaaagaccttcaaccagggtttcatgactaccgagctgctggcagccgccattctcgacatgaacctgcacaacctgacggatacgaaggatctcgatgtcgtagcctatgaaaaagaagctatggaccaactcggtttaatccccgaaatagctccccgctaccgcaccacctatttcaatcacatcataggcggctatgccgcaggctattacagctatctgtgggcaaacgtgctggacaacgatgcttttgaagcattcaaggaacacggcattttcgacaaggcaaccgccgaccttttccgccgcaatgtgctggaaaaaggagacagcgaagacccgatgacactctacaagaatttcagagggtcagaaccgcaattagagccgatgttaaaaaatcgcggtatgaagtaagaattgtgaaaaaaaagctatatttgcagccttatatacaatagaaatcaattaaaaagtaatcataataaactaaaagtaacatgcaaaacaaaggatttgtaagggtttttgcgatattgctcacactggtgtgtgtgttctatctctccttctcttttgtgacccgccattacgcccataaggctaaagagttcgcaaaaggcgatgtgaaagtagaacaggactacctcgattctctgtcaaacgagaaagtgtggttcggcaattggacgctgaaacaatgtcgtgaaatggagatcagtttaggtttggacttgaagggtggtatgaacgtcatcctggaagtatcggtacccgatgtcatcaaggcattggcggacaacaagtctgacgaagcattcaaccaggcactggccactgcggcaaaacaggctactaccagccaggacgacgttatcacgttgttcatcagagagtatcacagaatcgctccggatgcttcactctcacaactgttcgctacccaacagctaaaggacaaggtaaaccagaaatcttccgatgcagaagttgaaaaagtattgcgcgaagaagtaaaggcagccgttgacaactcattcaacgtactccgtacccgtatcgaccgcttcggtgtggttcagcccaacatccagagtctggaagacaaaatgggacgtatcatggtggaacttccgggtatcaaagagcctgaacgtgtaagaaaattgctacaaggttctgccaacctggaattctgggaaacatacaacgcaaaagacgttgcttcgtacctgcaatcggctgatgccaaattgcgtgcaatcctggctaccacagaagacgcagcagaagcaacagacagcgtagctgccgaagctcccgccgtagcgcaagctaccagcactaccgacagccttgccgcagcactgaaaggtgaaagcaaaacacaggctgccgaccttgagcaaatcaagaaagaacatccgctgctggcagttcttcaggtaaatcccagcggtcaaggccctgttgtaggttatgcaaactacaaggataccgctgatatcaacaaatacctctccatgccggaaattcaggctgaaatgccgaaagacctgcgcctgaagtggggtgtttctccttttgaatacgacccgaaagcacagactttcgaattgtacgccatcaagtctaccgaacgtaacggacgcgctccgctggaaggtgacgtagttgtaaacgccaaagacgaattcgaccactatggcaaacctgccgtaagcatgtctatgaatacggacggtgcacgccgttgggcacaactcaccaaacagaatgtaggtaaagccatcgccattgtactggacggctatgtatactccgcaccgaacgtaaatcaggaaatcaccggcggtaactcacaaatcaccggtcacttcactcccgaacaggcaaaagacttggcaaacgtattgaaatcaggtaagatgccggctcctgcccacatcgtacaggaagacatcgtaggtccgtctttgggacaggcatccatcaacgccggtatcatgtcattcgttgtggcattgattctgttgatgatttacatgtgctccatgtacggtttcatcccgggtatggttgccaacggcgctctgatattgaacttgttcttcacactgggtatcctctcatccttccaggcagctctgacgatgtccggtattgccggtatggtactgtcgctcggtatggctgtggatgccaacgtattgatttacgaacgtaccaaagaagagttgcgtgcaggtaaaggtgtcaagaaagcacttgccgacggttactccaatgctttctccgcaatcttcgactctaacctgacatctatcatcacaggtatcatcctgttcaacttcggtaccggtcctatccgcggtttcgccacgacactgattatcggtatcctgatttcattctttaccgctgtgttcatgacacgtttgttctacgagcacttcatgaacaaagacaagttgctgaacctgacattctctacgggaatctccaagaacctgatggcgaatgtacacttcgacttcatgggcagaaacaaactctggatgacgctggcaggtgtagcggttgtagtttgcatcggcttcctcagcatccgcggtttgagccagagcatcgacttcaccggcggacgtaacttcaaggtacagtttgagaacaaggtagaacccgaacaggtacgcgaattgatttccagcaagttcggcgatgccaatgtcagtgtcatcgctatcggtgctgacggcaagaccgtacgtatcagtaccaactaccgtatcgaagaagaaggtaacaacatcgactccgaaatcgaagcatacctgtacgagaccctgaagccgttgctgacccagaatatcacgctggaaaccttcatcgaccgtgagaaccatacgggcggcagtatcatcagctcacagaaagtaggtccgagtattgcagacgacatcaaggtatccgctatctggtctgttgtattggcattgattgctatcggtctgtacattctgctccgtttccgcaacattgcctactctatcggttccgtatgtgcactggcctgcgacacgattatcattttgggcgcctactccatgttctggggcatcctgccgttctctttggaaatcgaccagacgtttatcggtgctatcctgacggctatcggttactcaatcaacgataaggtggtaatcttcgaccgtgtacgcgagttcttcggtctctatccgaaacgcaacaagaaagtattgttcaacgattcactgaacacgactctggcacgtaccatcaatacctcactgagtacgttgattgtattgctgtgtatcttcatcctcggtggtgattccatccgcagcttcgcgttcgccatgattctgggtgttgtattcggtacactgtcttctctgttcgttgcatctcctatcgcttacatgctgatgaagaacaaaaaagatacagaacaggcagtagctgttgaagaagcaaaataattcctattatataaataggataaaaataagagaaagaggaaatcccggtgtgacggggtttcctctttctcttttctacagaattttacggatactcctctacagcagcaggaagttccgcacacaaaaaaaggacgtccgtatcataacagacatcctttcgtagctccgaggggaatcgaacccctatctaaagtttaggaaacttctattctatccgttgaactacagagcctttttgcatacattctgcatatagcaatggaatgcgggtacaaagataatgtattctgctgattttccgaaaaaagttttgttaatccgattaactttacgaaatttgtctttgaacaaaataagtataagtttccttatataatacatataataattcgtaagttatggcaaacgacatgatggtcaaagaactggagcaagtggtagtccgcttctccggagactccggcgacggtatgcagctcgccggcaacatcttttcaacagtttcggctacggtaggtaatgacatcagtacattccccgattatccggcagacatccgcgccccgcaaggctcactgacgggcgtatccggttttcaggtacatatcggtgcaaacaaagtctataccccgggtgataaatgcgatgtactggtagcgatgaatgccgctgcgttaaaaacacagtataagtttgccaaatctaccgcatgtattatcatcgatacggacgcattccagaaatcggatttggaaaaggccgctttcaagacggacaaccccattgaagaaatgggcatcaaacaggatatcattgccgctcctatctcccaaatggtgaaagactgccttgccgacacgggtatggacaacaaatccatgctgaagtgccgcaacatgtttgcagtgggactggtatgctggctgttcagtcgcgacctgacgatagccgaagagtttatccgcgagaaattcgccaagaaacctgaaattgcagaagccaatatcaaggttatccgcgccggatacgactacgggcacaacacccacgcatccgcctctcacacttacaagattgaaagcaaagtaaagactcccggacgctatatggacattacgggcaacaaggccacggcctacggcttcatagccgctgccgagaaagcaggcctgaagctttacctgggttcttaccccatcacccccgcaaccgatgtgctgcacgaactttccaagcacaagtcactgggcgtaatgaccgtacagtgcgaagacgagatttccggttgcgcctccgctatcggagcatcctttgccggagcattggcggttacctccacctccggaccgggtatctgcctgaaatcggaagccatgaacctggctgtcattatggaactgccgctggtggtgctcgatgtacagcgcggcggtcctgcaacaggtctgcccaccaagtccgagcagaccgacttgctgcaggtactcttcggccgcaacggcgaaagccccatgcccgtacttgccgccacctcaccgacagactgctttgaatgcgcctatatggcatccaagatagcattggagcacatgacccccgtcgtactgcttaccgatgctttcgttgccaacggctcggcagcgtggaaactgcccaagctcgccgattatcccgctatcgttccgccttatgtacgccccgaaatgcagggttcatggacaccctaccagcgcgatgaaaagaccggcagccgctattgggccatccccggaacagagggcttcacccacatcctcggcggattggagaaagacaacaagacaggcgccatctctaccgaccctgagaaccacgacctgatgacccgcctgcgtgccgaaaagattgccaaaatcgaagtgcccgatgtagaagtggaaggcgacaaggacgatgccgaactgctgattgtcggcttcggcggcacttacggccatctgcacgccgctatggacgagctccgcgccacaggcaagaaagtggccctcgcccacttcaagttcatcaatccgctgcccaagaatacggcagaggtgatgaagcgctacaagaaagtagtggtggccgagcagaacatgggacagtttgccggatacctgcgcatgaaagtagacggtttcgttccctaccagttcaatcaggtgaaaggccagcccttcctggtgaacgagttagtacaagcatttgaggagattatcaagaactaaaaaagaaaagaactatgtgcgaatatacagcaaaagacttcaagaaagggcaaccccgctggtgtccgggttgcggtgaccattttttcctcgcgtccctgcataaggctatggccgaaatcggcgttccgccttacaaaacagcagtaatctcaggtatcggctgttccagccgtctgccccactatatgaatacctacggcatgaacaccattcacggacgtgccgctgccattgccaccggttgcaaggttgccaatccggaactcaccgtatggcaggtgagcggcgacggcgacggactcgccatcggcggcaaccacttcatccatgccaaccgccgcaacatcaacctgaacatgattctgctgaacaaccgtatctacggcctgacgaaaggacaatactccccgacgtctccccgcggtttcgtcagcaaatcatctccttacggtacggtagaagacccgttccatccggcagaactctgcttcggtgcacgcggccacttctttgcacgcgccgttgccacggatgcagccggaacggtggaaatcctgaaagccgcctacaaccacaaaggagccagcgtctgcgagattctccagaactgcgtcatcttcaataacggcacgcacgatgccgttgccaagaaagaagaccgcgccaaacacgccatctatctggaacacggcaagcccatgctcttcggcgagaacaacgaatacggactgatgcaggaaggcttcgggctgaaagtggtgaagctcggcgagaacggcattacggaaaaggatattcttatccatgacgcccattgcgaggacaacaccctgcaactgaaacttgccctgatggaaggccctgacttcccgattgccctcggtgtaatccgcgatgtggaagctcccacctacgatgatgccgtacatgcacaaatcgaagaggtatccgccaagaaaaagtaccacaactttgaggaactgctgatgaccaatgatacctgggaagtgaaataacctccacggaacaggaattcagtttacacacattcccccttcaccctccacatccctttatccataagggacagcgggtgaagggggctttttatatcccgattggccataaagaaacaagcggcatcagctctccaaaggcagaggcaaaataccgatatgcctcagcataaaggtgacaatacactgtataaaaccccgttgcgcatctactaaaaccccgttttccaactgcgggccgtgcggttgccaattgcgggctgtacggttgccagctgcgggccggacagcccgcaaccggaaaacgaagaaatacataagggacaagcacattttacaaggtgcatcgggaagttttccaccaggcattggcacattatacccgggagattgccccgctcacacgcggtataatcctattttccacacggtcttccggatgcaggcacaaagtataatccgccggaaaaccgccggaataagatgcaaacgccacaagtgtggaatggcaacctgcaagtgtggattttttccacaacattccacaacctgcatacacatattataagtatttataaaaaaacaatgaactgaatatcataggcataaatactttgcatagtctacgtatcttttttggcatactgcttgcttataacaaatacaaataaaatccaacagatttaattgtacaaggaaataatcattgtggaaatatgaagtctatcaagaaaaaacggagtatggcttcgcacaggaagctgcattttcaaaaggtattaggtagtatgattgtggcattggcgcttctgtttgcaggaagtgccggtgcgcaggaaaccaaaacaatcaaaggtatggtaagggatgtgacgggagagccgcttatcggcgccagcgtcatagagaaaggaaccaacaacggtgtcattaccgatgtggacggaaactttacactgaccgtgcctgccgatgcaacgctgtccatagcctatatgggctatgccacccgcgaaatacatctggcaaaacgcaagaagcagggcgacctgagggtaacgctgagagaggactcgcaacagttgaaagaggtggttgtcacggccatgggtatcaagaaggataccaaacggctgggttacgcggtgagcactatcgaatcggacgagatagtgaaggcgggagcaaccaactttgcatccgccatgtacggtaaggcgccgggcatccgcatcacgcagacgcagggcggttccgccggagccgtgtctatcaatgtacgcggactcacgtccatcaccggaaacaaccagccgctcatcatcctggacggcgtgcccatccgtaacggcggaacgggcaagagtaccgactttgccgagttcggcaacgacggacagatacgttccaacggtctggtggacatcaaccccgaagatattgaaagcgtaagtgtgctgaaaggcgcttcggccacggcactttacggttcggaagcggcaaacggcgcggtggttatcaccagcaaacgcgccaaaagcggcaaactgacggtggacttcaccgcacaggtcaccgccaacctgcccgcctatctgccgaaagtacagaccgtatacggcccgggacgttacaacacggaatacagcgattacgaaaaacaaacgggcggtttctaccagcgcaccatgaacggcgaaagctacagaagtctgtataatacgaccatgtctttcggtccgaagtacgacggcagcgacgtgctgtactgggacggcaagatgcgcccctacctgccggctacggacaatccgtggaaagagctgttccgcacgggctggaaccagacctacaacctcgccatctcgcagggtacggagaccagcagcaaccgcttctcctacaccttcatgggtgaaacgcccaactcgctgacgggcagcttcaccaaacataacttcaagctgacgggttcttacaaaccggcaaggacgctgaacatagaatactcgctgaactacatcgtgcaggatgtaaaggaccgcccgcaaacatcgctgaacctgtacggcagtttcagcaatatgttctcctccttcatggatatcccctatctgaagcagagctacgtcaccagcctgggctaccgcaacacgtacgcaggcggcgatgccacactgacaccggacgaagcctgggcatacgacccgggatacctgaacggcgtatcgaatatgctctggaacatgtatcaccaccacagcaaggagacagagaaccgcctcatcggtatgatacgccccacctggcagataaccaattggctgagtctgcgcgcccagctctctaccgacatcacggacaccaagcagacgctggagtacgagacggaacgccccaactccctgtacgaccccagcggcagtttccagaacatcaaccgacgctatgacatcgtgtacggcgatgtgatgctgaacttcaactacaacatccgccgtttcgacattgccgccacactgggctggacgggacgttacgaaaacatgaacaacatgcgcgtctccaccaacggcggtctggttacggaaaactggttcgacctcaacgccagccgctacaccgccagcagcacgctgcaacgtatggaactgctgaaaacgggatacatgggtacgctgagcctgggttgggacaactacctgttcctcgaactcaccgggcgtcaggaacgttcgtccacactgaaggaccaaagtttcttctacccctccgccaacctcagtttcctgttctcgaacgccttccgcatgcctgcatggtggaatcacggcaaactccgcctctcctacggcgtcgtaggtaacgcaccggaaacgtatgccgccaacatcatctacgagcagggttcggacaacggcttcacatggaactacgttccttcttcgtggggaaatgccaatatccgccccgaaaagaagtacgaatacgaaataggttttgaaagcaagttcctcaacaaccggctgggcttcgacgtatcctactacaacaaccgcgtgaaagaccagatactctccacgccgcaaccctccacatcgggtgtgaagtacgtgctgatgaacgtgggagaggtggccaacgaaggctgggacatctccgtaagcgccactccggtactgaccaagaatttccgctgggacctgacggccaactacggcatctaccgcaacaaggtcgtgaagctcgccgacggcgtaccgtacctcgaaatatccaacataggcggtggcggagccaagatacaggccgtagagggacgcccgatgggtgacatctacgtgcaagtgccccagatgaacgaaaacggagagtatctcgtatcggacaagggactttacatgaaccagaccgaactgcaaaaagtaggaaacatcaaccccgacggcgtaggcggtctgttcagctcgttctcctacaagaacatcttcctggatttcagtatcgacttccgcataggcggcgacgtcatcaacgagatgtaccagtattccaccgcatcgggtctgacaccggagtcgctgcaattccgcgatacggaacacggcggcctgtcctactactatccgggcaacaacaacgccagcggcgtgcccgtgcaggtagacccgtcactgggtgcagggcctaacggagaaaccgtttatcacgacggcgttatcctgccgggcgtagtggcctccaccggcgagaagaacacgcgcatcatccctgccggctactattacaaccagacctacaactggggtacccagcccgaacagcttacgtaccgccactcggtattcgacaacagctatgtgaagctgcgcgagctgaccatcggctaccagtttccggaaaagctgatttccaaactgggcatgacgcggctgagcgtttcagtgttcggacgcaacttgttttacttctacaaggcactgaagaattacgatgcggaatcttccgtaggaacatcctgggcaagccaggcggtagtgggcggctccactacggcaacacgtaatttcggtgtgtcgctgcgggcaagcttttaggaaatagagaattgaaaaataagactttagagtgaatgacaatggatatgaaaaagataaatataggagcgttcgttgtagcgggagccatgctgatgacagcttccggctgtacggactccgacttcgacagcaaatacgaagacccctcaaaggtcaaccaggttaccatcagcaacctcatggtgggagttttccagaaagtgaaagattatgacatatatgagtacggacgtttcttcggcttcgactcgcagtttgtgggcaagtacgcgcagaccttcggctacagctattcgggcggtatgtacagccccggatatgcgcctgccatagacgggcaatgggacaacctgtattcggcactgatgcaataccgcaagatggaatcgctgtacaatgaagagaacgatacgcagaaggcacaggacgaagcctttatgctggcagccaaagtgcaactgtacgacttctttgccgcaacggtggatattttcggcgacatgcctttcttcaaagcatgcaccctgccgctgaccaacgacgtaaacggttcttacgctccctacgacaaggcggaagatatttataagacaatccttgacgaactgaaagacatcgccccgcgtttccgttcggcagccgtaccgaaaaacttcagtacccaggacttcatcaacctgggagatatggagaaatgggaacgctatgcaaactccctgcgcctgcgccttgccatgcgtgtagccacgcagggagctttgcaggcggaaggacgtgcggttatcaaggagatattggaaaaccccgccgactatccgctcgtagaggagcggggaaacaacatcttcatcgtcaaccagaagtccgggcaactgaacttcaccgccggccacggattgggcgactgggttacgaaccgtcttgcttcgggcgctatcatagaccgtatgctgagccacggcaactatgacatgaccagcaacgatccgctaagcggcgtctacgtcaaaggcgaagacgacccccgtatcctgctgaactacaatcccgtgagcattaccaaccgcgaaaccggacaggtggacgaacaccgttacctgggtacggacctcacggtagcagacgaactgacggagtattacagcgctcaggcacaagacgaagtgaacaccgccaacaaaggtttctcgcagattacccaaagaggctttttttgggaaaacgataaattcgatatgctgataatggcttcgccagagatacatttcctgaaagcggaagcctatgccatggggtatggtgtggcgcaggatatggcgaaagcggaagaggaattcaagacggctgtcagccaatccatcgccctgtattactattacgattcgataggctcgggagagaattgccgccgttacgacgctcccaccgatgaagagattgcagactttgccaatgacagatggaacagtacggcatacgtggacaaactggatgccattatcacgcagaaatggctgcacttcggtttccttgtcagccgcgaggcatggagtgacatccgccgcacaggctatccttcgggactggtgttcccggaagtgtcgggtactatccccaatgtgccgaaccgctggagataccccagcacggaagtgaattacaatccgtactataaggatgtagccggtacagacacgtatacggaaaagctgttctgggccaagtgaacaatgagagcgaagcgggaatggatatcctgatgcagtagcttgcaaacataaaagagccgtatcattactcacaaacggagttgatacggctctctttatggtgcaatgaacagtgccggggttcggattggacggccgcaaccgccctgcggattacagcttgtcgccgaatgccaagtctccggcatcacccagccccggtactatatacgaatgctcgttcatatccgggtcgatagcaccgcaccacaaggaaacctcgtcgccggggaagagtttctgcaaatgctctactccctgccggctggcaatgacgcaggcaatctgcagtttggcaggcgtgcccttggtaaggaaagccttccaggcaagttccatgctttcgcccgtagcaagcatcgggtcaaccagtaacagagtcttgccggaaaggtcgggagtggcgatatactcgatgtgcacatccaccgtacggcactctttatccttataataacggtaagcggaaacgaaagcattgcccgcacggtcgaacacattcaggaaaccggcatgcaagggaagcccggcacggaagacggtggcaatcaccacatcatcatcgaaagtgctgacgggggctatccccaacggcgtttgtacctgcttttcggaataggtgagttccttactcatttcgtacgccatgatttcgccgatgcgttcgatgttccggcggaaacgcatacggtcggactgtacttgcacatcacgtatctccgccatgtattggttcaagactgagttagtctcggcaaagttgataactttcattatattatcagattaaaatatgtattggttattccgtatattgatagaacagaagtgcaaagtaaacgatttccactcaatttgcaacattcagtttgcagatattgttacggttctataaaagatttcctattacagaaaaatttctctaataggatgtttctttaaaaataaagtattacttttgtagtcgcaaaaacaagggccttactgaacaacgcggttttccacaaactcgcccccttgcaatgaagcatacgaatgcgaagagagattataaaccaaataccaattttaaaatcttaaaaagaaatggcaaatttagatttaagcaagtacggtatcaaagacgtgaaggaaatcatccacaacccgtcttatgatgtattgttcgctgaagagaccaaaccgggtctggaaggcttcgaaaaaggtcaagtaactgaacttggtgctgtgaacgtaatgactggtatctataccggacgttctcctaaagataaattctttgtaatgaacgaagccagcaaggattctgtatggtggacttcagaagaatacaaaaacgacaacaaaccctgctctgaagaagcatgggccgacctgaaagctaaagctgtaaaccagctgagcggcaagcgtctgttcgttgtcgatactttctgcggtgctaacgaagctacccgcatgaaagtacgtttcatcatggaagtagcttggcaggctcacttcgtaactaacatgttcatccgcccgactgctgaggaacttgctaactacggcgaacctgatttcgtatcattcaacgcttccaaagcaaaagttgacaactacaaggaactgggtctgaactctgaaacagctactgtattcaacttgaagaccaacgaacaggttatcctgaacacttggtacggcggtgaaatgaagaagggtatgttctctatcatgaactacaagaacccgcttcgcggtatcgcttccatgcactgttctgccaacaccaacatggaaggtacggactctgctatcttcttcggtctgtcaggtacaggtaagactactttgtctaccgacccgaaacgtctgctgatcggtgacgacgaacacggatgggatgacgaaggtgtattcaactacgaaggcggttgctacgctaaggttatcaacctcgacaaagaaagcgaacccgatatctacaacgccatcaaacgtgacgctctgctggagaacgtaactgttgacgctgacggcaagattgacttcgccgataagagcacaactgaaaacacgcgtgtttcttatcctatctatcacatcaacaacatcgttaagccggtatctaaaggtcctcacgctcatcaggtaatcttcctgtcggctgatgctttcggtgtattgcctccggtatctatcctgaaccccgaacaggctcagtactacttcctgtccggtttcaccgctaagctggccggtacagaacgcggtatcactgaaccgactccgacattctctgcttgcttcggtgctgctttcctgagcttgcatcctactaaatatgcagaagaactggttaagaagatgaacaaggtcggcgctaaggcatacttggttaacaccggctggaacggtagcggcaagcgtatctctatcaaagatacacgtggtatcatcgacgctatcctcgacggttctatcgacaaggctccgacaaaggttattccttacttcgactttgttgttccgacagaattgccgggtgttgatccgaagattcttgatcctcgcgacacttatgaatgtgcttgccaatgggaagaaaaagcaaaagacctggcaggacgtttcatcaagaacttcgctaagttcacaggtaacgaagccggtaaggctttggttgctgctggtccgaaactctaatagaaccagattatatattttaaggcggctttcgttctcggaagccgctttttttgttagatttgcgaagaaacaatttaatagacaacagagaatgaagagtgtaaaggttatgctgttaggcgcaagcctattgatgctgtccgcttgcgggccgcaggtacagaaagagagtgaagccacagttacggagaaaagcaattcggaagcggtaatcgagacaatcctatcgcgccgcagcgtccgcaagtacaaaccggaagcagtgaaccgggacacgatgaaggtaatcttggagtgcggtatcaacgcccccaacggtcagaacaaacagtcctgggcggtacgcgtagtagacaacccggaattcctgaacggagtaagtgaaatcttcaagcagaagaacccgaaagcagcggaagaccccaatttcaagaatatgttccgcaatgcgcccacggtagtgttcatcggaaatgatacttcgtacgactgctcgcagatagactgcggactgctgggtgagaatatggtacttgccgcctggtctatgggcataggctcctgctgtctggcaagccccacacgctttatgaccgatacgcccgaagctgccgaatacctcaaaagactggaacttcccgaaggataccggctgctttactgcattgctttcggatatccggatgaaacgcctgccgccaagccgagagatgccgccaaagtgaaatacgtagactgaccgataaaataaaaacttcagaatccccccattgcaataaaagaaggagtgctccacctttacagcgaagcactccttcttatatataacaactaaaaagtaaaatcagttcttattggcacgcttgcgctctgtctcatccaagataaccttacgcatacgcatggacttgggagtaacctctacatattcgtctcccttgatatattccaacgcttcttccagagagaactgcaccggcggaatcagacgcgctttctcgtcggaaccggaagcacgcatgttggtcagcttctttgatttggtaacgttcaccacaaggtcgttatcgtgagagtgctcacctacaacctgtccggcatacacttcttcctgcgggaagatgaagaacttaccgcgatcctgcaatttatcgatggcataggcaaaggctgtacccgactccatggcaatgatggaaccgttggtacggcgttcgatttcacccttatagggttggtattccttaaagcggtgcgccatgatagcttcaccggcagaggcagtcagcacattggtacgcaaaccgataataccgcgcgacggcatattgaactcaaggttcacacgctcgccggcgctttccattttcaccatttcacctttacgacgggttaccatatcgataatcttgctggcatactcttcgggaacgttgaccgtgagctcctcgataggctcgttcttcacgccgtctatctccttgaagataacctgcggctggcctacctgcaactcatatccctcgcggcgcatcgtctcaatcaacacggaaaggtgaagcacgccacggccggacaccacccactttccgtcttcctcgctcttgcgtacgcgaagcgcaaggttcttgtccaactccttcatcagacggtcatgtatatggcgggaagttacaaacttaccttctttgccgaagaacggagaatcgttgatagtaaacagcatactcatggtaggctcgtcaatggcgatgggcggcaatgcttcggggttctcgtagtcgcaaatcgtatctccgatttcaaacccttcgatacccactaaggcgcagatatcaccggaagatacctccgataccttcacacggcccataccttcaaacgtatgcagttctttaatcttcgacttgacgattgtaccatcgcgctttgccaaagacacgttcatgccttcccgcaaagtaccgcgatgtacacggcctacggcgatacggccggtataagaggagtagtccaatgaggtcaccagcatctgcggcgtaccttccaactgtgtaggagcgggaatgttctccagaatgcagtccagcagcggatagatattgtccgtcggcttctgccagtccgtgctcatccagttgttctttgccgaaccgtagataacggggaagtccaactgctcttccgtagcttccagactgaacatcaggtcgaacaccatttcatagacttcttcggggcgacagttgggcttgtccaccttgttgactacaacaataggtttcaaaccgatctgcaaagctttctgcaatacaaaacgggtctgcggcatcgggccttcaaaagcatccaccaacaggatacatccgtcggccatattcaatacacgttccacttcgccaccgaagtcgctgtgtcccggagtatcgataatattaattttcgtgtctttatagctgatagaaacgtttttggaaaggattgttatccctcgctcacgctccaaatcattgttatccaacattaattcacctgtgctctggttgctgcggaaaaggtttcctgccagaagcatcttatctacaagcgtcgttttcccatgatcgacatgggcaataattgcaatgtttctaatattttgcatataatacctattatttgaccgcaaaggtacgaattttacagtatatacatcacagagaaaagatttttttgctgaatatcattgcaatataaaagataatatctatctttgcatttgcacgctcgaaagagaaaagaattatcaactttttaattaaacactatgtatttagacgctgctaaaaagcaagaaatcttcggcaaatacgggaagtctaacactgatactggctcagcagaggcccagatagctttgttttcataccgtattgctcatctgactgagcatatgaagctcaacagaaaggattatagtacagaaagagccttgacaatgttggtaggtaagcgccgcgcgctgttgaactacctgaaagaccgcgacatcaacagatatcgtgccattgttcaggaactcggcttgcgtaagtaatttacttgcggtaaacttattaaagcggcggtattttccaatgagaataccgccgttttacttttatcactgtcttccctgtacaggggttttaaaagcctattacaattgtatcttatagagtacgtgctctttcagcagatgcccgtcgggcactgcagggtgcataaaattcttttcaaattccatccctatcttctgcatcacccgttgcgaacgtttattggtcagcgaagtaaaagcccggaccatagaaaacggaagattctccttagcataagccagacatgacttcgctgcttcggtagcatacccccgaccccaatattcctgcttcaatcgccacagtatctcaatacccggagcaaagtccacatcaaacataaagttatgaaagcccgtaaaccccacaaaggctccatcggacttctgctcgatggcatatccgccatatccgtactgaagaaactcattcctgacagtatcaaaaagattgcgcgactcttccccggacaaaggatgcagaaagaactccatgacagacggattcccgttcatctctgcgaaaggaacgaagtcttcttctttccaatcgcgcaatatcaaacggggagtttcaatatataccatacttaataatctttattctcatacaaaaatactgaatccgttttacttctcaaaaacattatctttatctttgttgatacctaaaaccaaacaacgatgaaaacagctaaattaattctattatgtttgtcgggaatgcttgccatgcagtccgcaacagcacaaagccggagtgaaaagaaagcacagaccgaacgtaacgtcagggaagcgataaatgccgatcactacaaaatcaacgtagactatatgcaacccatgaaaggtcgcagccgcgccctgacatccgactactccatcgaaatcaggaatgactccgtcttttcttacctgccctacttcggagtggcatacaatgtaccttacggcggcgggaagggattgatatttaatgccccgataaccggatacaggaaagaaagcctcaaaaaaggaaaaacccggattgatttcaaaaccggcaacgaagaagataaatatgaatacagccttactatctattccgacggttcggccaacatacatatccagccgatgaacagacaggccatttcatactccggagagttggatataaaagagtaaggaacctctatcaggcttcatgcaatcataagccatacgtctgcgaatatcactcttgctctgagaaagccggaatagcgatggcatacagacaaaatctcctgtacacctgcaaagaccataagcaaacttttcgtcatagaatgttgcaccaagtaaaagaatatcttatttttgcaatttacagctattaatcataaccttttagactgaaaatactatcaaattatggatacaagtaagattgtaggagaaaaaatcaaatcactccgcgaaagccagtccatcagcatggaagagttggcgcaacgttcggggctcgccatcgaacaaatcgaacgcatcgaaaacaatatcgacctgccttcattggctccgctcatcaaaatagcccgcgtactgggcgtgcgtctcggcacattccttgacgaccaggacgagaacggtcctgtggtatgccgcaagtcggaagcaaaggacagcatcagcttctccaacaacgccatccactcgcgcaaacacatggaataccactctctttccaaatcaaaagcagaccgccacatggaaccgttcatcattgacgtagctcccacggacgacagcgatttcgttctttcctcacacgaaggcgaagaattcatcatggttatggaaggaaccatggaaatcagctacggcaagcacacctacctgctcgaagaaggggacagcatctactacgattccatcgtaccgcaccatgtacacgcctatgaaggacaggcagccaaaatactggcagtaatttatacaccaatctgataagtataaggcataagggagtgtgtcaaaatacacttgatgatttcttttaggcacggattacacggattctacggaaacacagattttctttgttctttttccgtgaaatccgtgtaatccgtgcctaaaaagaaacaaacggcaagcgaattttagttttgacataccctcttatatttcatacttcatacgttaattagcatcgttatgttatacgaaagaacgcttggccaatggctggagcattgggccacaactacacctgacaaagaatacattgtttactccgaccgtaatctgcgcttcacctggagccagttcaaccgcagagtggacgacatggcaaaaggacttatcgctatcggcgtggaacggggaacacacgtcggcatctgggcggcaaacgtaccggactggctgacattgctgtatgcctgcgccaaaataggcgccgtttatgtaacggtaaacaccaactataaacaagccgaactggagtacctgtgcgagaattcggatatgcacacgctctgtatcgtcaacggcgagaaagacagcgacttcgtgcagatgacctacgccatgctgcctgaactgaaaacctgccagcgcggacatctgaaaagcgagcgcttcccttatatgaagaatgtaatctacgtagggcaggaaaagcacagaggaatgtacaacacttccgaaattctgcttttaggcgacaacgtggaagacacccgtctgaatgagctcaaaagccgggtaagttgccacgacgtagtaaacatgcagtacacttcgggcactaccggattcccaaaaggggtaatgcttacccactacaacatcaccaacaacggtttccttaccggcgagcatatgaaattcactgccgctgacaaactctgctgttgcgtccccctgttccactgcttcggcgtggtgcttgccacgatgaactgccttacccacggctgtacacaagtcatggtggaacgtttcaacccgttggtggtgcttgcatccatccacaaagaacgatgcaccgcactctacggcgtacccacgatgttcatagccgagctgcaccatccgatgttcgacctgttcgatatgtccagcctgcgcacgggtatcatggccggctctctctgccccgtcgagctgatgaagcaggtagaggaaaagatgtacatgaaagtaaccagcgtttacggcctgacggaagccgctcccggcatgaccgccacgcgaatagacgattcgttcgatgtacgttgcaacaccgtaggacgcgactttgagcataccgaagtgaaagtcatcgacccggaaaccggcgaagagtgtccggtaggcgttcagggtgaaatgtgcaaccgcggttacaacaccatgaaagggtattacaagaatccgcaggccacagccgaggtcatcgacaagaacggtttcctgcactccggagacttgggcgtgaaagacgaggacggcaactaccgcatcaccggacgtatcaaagacatgattatccgcggcggcgaaaatatctatccgcgcgaaatcgaagagtttctctatcaactggaaggcgtcaaggatgtgcaggtagccggcatcccttccaagaagtacggcgaagcggtcggcgcattcattatccggcacgagggggcagacctgcacgaatcggatgtacgcgacttctgcatcggcaagatttcccgttacaagattcccaaatatattttctttgtaaaagagttccccatgacaggaagcggcaagatacagaaattcaagctgaaagacatagggctgcaactttgcaagaagcaaggaatagaaattatttaagcagttaggagtaaaccaagtaaatatggggaattagcttatactatctgtcattcagagcatcgcaaagaagctctgaatgacagatactcttaacataaatgtatttttcaacattcattcaaccactcactccgctttctcggggtagttcatattctcttccgtcatctgttccagcacttcatgcaaatacttggcagactcccattttgccatgggcaggtcgtggagcaggtaattgccgcaatcctgcggagcaacaccgggaacttcgccctcatatccggcaacaaagcggaacgtatcctgcatcagcgatacgatgtcctgcggctgcaaatcgcctttcatcagcagataattgccggtaaggcagcccatggggccccaatagataatcttgtcctgccattgcggttcattgcgcaggtaggtggcagccagatgctcgatagtgtgcagggcgccttgtcccaatgccggttcacggttgggctctttcatacggatatcaaaagtcgtgatgacttctccgttcacttcatccttgcgcgatacgtaaataccgcgcagcaaacggatgtgatcgatggtaaagctgggtattttcttcataagttataagttgtgagttatgagttataagttgtcgggcagggtggaaaggaaagtccatgtcgtaaggaaagaacgttccgccatcgtaccccaaaaatcggcatattgcgaagagtggtcttccacgcccggcgtatcgctgatgatacggaagctgaggaaaggaatgccgtacagatagcaggtctgcgcaatggcagcggactccatatcgacagccagtccagccgggaagcggcgtttgatggcatccagctctgtgcggttggtgataaaccggtcgccggtacatatcagtccgctatgaatacggctttccaatccggtcttgttcagagacaaagcatgttccaaaagcggggcgcaccccttgtacactgcaggcaatccctgcacctgaccgtactcgttaccgtcaccgcaccatacatcgtggtacgccaaagagtcgctcgccactacatccgtcaccttgagacaagcgtcgatgccgcccgccacaccggtactcacaatgcagtccggggcaaaacggcgtatcagctccgtagctcccaccgccgcattcaccttaccgatgccgcattgcgtaagtatcacgcggttgctgccaagcataccttccacatagtgcagattcccgtaatccgctaccttcttctcctgcaaacgttccgccagttggcggtgttcgctatccattgcactgataacacctatcgtcatgcttaccgatttccaaatttcagatttatgaattatatgatttagggaaggcaaaggtacgatatttcagcagatttatctatccaactggtgcataaatcaatatttatgtataagtttgccgctgaaattcagattaggagtcaagggagtcgactcctcaccctttcggctcccccacataaaccataacccagcaaagatgataaagaagattcttcccgacttaattgccatcctggcattcgtcctgatttctttcgcctacttttttccggcggatatagaaggacgcattctgttccagcacgacaccgcagccggagccggcgccggacaagaagccaaagagtattacgaacagacaggcgaacgcacccgctggaccaattcccttttcggcggaatgcctacctaccagatatccccgtcctacgactctaccgtaccgctgcaatggacacagaaaatataccagctcttcctgcccacctacgtcaacctgacgtttatcctgatgctgggcttctacatcctgctgcgggcattcggcataccggcatggctggcaggcttgggcggcatcatgtgggccttctcgtcctacttcttcattctgatttcggcgggacacatctggaagttcatcacccttgcctacatcccgcccacaatagcgggcatcgtgctcgcctaccggggcaagctgctggcaggcggcatactcacagccttcttcatcgccctgcaaatcatgtccaaccatgtgcagatgtcctactacttcctgttcgtcatcctgttcatcgcaggagcatactttgaagatgcgtggcgcaacaagacgcttccccggttcttcaaggcaagcgccgtactgctggttgccgcccttatcggtgtggccgccaacctttccaacctctatcacacttatacgtacagcaaggaaaccatgcgcggcaaaagcgagctggtacagaccggtgatgctgccaagcaaaccagcagcggactggaccgcgactacatcaccaactggagttacggcatcggcgaaacctggacgctcctcgttcccaacttcaaaggcggttcctcctccgcccccctcagccagagcgaaaccgccatggaaaaggccaacccaatgtacgggagtctgtacaactcattcccgcagtacttcggcagccagccctggaccgccggccccgtctatgtgggtgcattcgtactgttcctcttcgtgctgggctgctttatcataaaaggccccttgaaatgggcgttgctgggagcaaccttcttctccatcgtcctggcatggggcaagaacttcatgccgctgacggacttcttcatcgattacgtcccgatgtacaataagttccgcgccgtatcatccatcctcgtcatagcggaattcaccattcccctgctggcaatctttgccttgaagcgcgtgttagaagaacccggaatatggaaagcgaacaagaaagcgttcggcatcagccttgcgctgaccgccggtgtagccctgctgcttaccgtagcgccgggtagcctcggctccggcttcgtacctgcacaagaagcacaaatgctgcagaatgccgtcgaccagcagatgatacccgccaacgagctgtccggcatccttgccaatctcgcagaaatgcggggtgcacttgtcagcgccgacgcattgcggagcttcatcatcatctgcatcggatgcgcactgctttggctccacgcggcaggcaagctgcgccggtcactgaccgttgcaggcatcacggttctctgccttgccgatatgtggagtgtaaacaaacgctacctgcacgacgagcagttcgtgccccgttccatccaaacggaaacgttcagcaaaaccaagaccgacgaactcatcctgcaggacaaaagcccggactaccgcgtactgaactttgcaaccgatgccttcaacgagaacaacacttcctactggcataagaacataggcggataccatgccgccaaactgcgtcgctaccaggaactgatagaacgccacatctctcccgaaatgcaggctgcctatcaagcgatagccgccgcaggcggagaaatggacagtgtggacgcctccaagttccgcgtactgaacatgctgaacacgaagtacttcatcctccccgccggacagcagggacagaccgttcccgtcctcaacccttatgccaacggcaacgcctggtttgtgaagaacgtgcaatacgtaaacaatgccaatgaggagattgatgcgctcaaaaccatccttcccaccgaaaccgctgttgtcgatgtccgcttcaaggatgtgctgaaagggatttcagaggctcataaagacagcctttcctccattcgcctgacaagttacgaacccaaccgtttggtttacgaaacggaaaacgcgggagacggcatcgccgtattctccgagatatactacccgaacggctggcaagtaaccattgacgggaaacctgccggactgggacgtgcggattatgtactgcgcgccttgtatattcctgccggcaagcataccgttgagatgcgctttgacccccaaagcctgcatgtaacggaaggcatcgcctacggagcattggcgctgctggttatcggagtggcagccgttgcgctgattgcacgcaaaaaagcgcaagaataggtagaatctacggggcaaccggattcatccacattcaatataacagagcaatacatctttctctctatagcagtacgcttttcctcacagccttataacaaagacatacagaggaaaatcaggtattgctatagagagaattcttttttctcaggaagaacatcggctgttgactactgtcaacagcccggttgacaatagccggccgatccgttgacagcagtaaacagctctgtcgacagtagtcaacacctgatgttcccagtggccgaaacgaatgccctacggatgaaaatacaatcctgcaacgtcataaatcagattctcctacaaggaaaagaatgaaaaaaatagtataaatcaccagcagaacgatatatttcagtaactttgctcttcaaatcaaaaaaacgatagagtatggaaactaccagacagaacaaaatagcccgtttgctccaaaaggaattaagcgacatcttcctgttgcaaaccaaatcgatgcccggtatactgatttcggtcagcgccgtacgcatcagtcccgatatgagcgtggcacgcgcctacctcagcgttttcccctctgaacggagcgaagaaatcatcaagaacgtcaatgccaacatgaagtccatccgctttgaactgggaacccgcgtacgccaccaactgcgcatcattcccgaactgaagttcttcgtggacgactcgctggattatctggaaagaatcgatgaactactgaaatagtggttaatccccaaccatgaatcttcctttttttatagcccgccgttatctcttctctaagaagaagcataatgccattaatattatatccggcatctcggtgtgcggggtggcgttggctacattggcgttggtgtgcacattgtccgtattcaacggatttcaggatatggtagcggggttcttcacggctttcgacccggagttgaaaatcaccgttcgggaaggaaaggtgttcgacccgctcgaatcgcgcgtgcagcaagtacgcgccctgcccgaaatagatgtatggacggagacgctggaagaaaacgcaatggtgcagtacaaggatcgccaggcaatggcggttatcaaaggcgtggaggataacttcgagcaactgacatccatagacagcctgctgtacggtacggggaagttcattttgaacgattccgttgtggactacggctttatgggtgtggagctggtgtccgaactgggcacgggacttcagtttgtcgacccgttgcgagtgtatgcacctaaaaggaatgtacgtgtcaacatcgccaatccgtcggcggctttcaaccaggattatctgttctcgccgggagcggtgtttgttgtcaaccagcagaaatacgactcacgctatatcctcacatcgttgggctttgcccggcggctgttcaattatgacacggaagtttccgccatcgaactgaaactgaaaccgggcagcaacaccgatgccgtgcagaagaaaatggaacgcatcctgggcgaccgcttcatcgtgcaaaaccgctacgagcagcaagcggatgtattccgtatcatggagattgagaaactcatctcctatctgttccttacctttatacttacaattgcctgcttcaatgttatcggttcgctgtccatgctgatactggataagcgcgaagatacggagacgctacgcaatctgggcgccgacgaccggctgatagcccgcatcttcctttttgaaggacggctgatttcggtgttcggagcaattgccgggattgtattggggctgctgctgtgtttcctgcaacaacgcttcggacttatatcgctgggcggcggcaacggaagttttgtagtggacgcctatccggtgagcgtgcatgcaacggacatcatactggtattcgtaacggttatcaccgtagggttcctctcggtgtggtatcctgtgcggtacttgagcaagcggttgcttaaaaaataaaagcatcctcccccttcacccgcagaatcccatgaacagtatgatgcaaaggaattgtgaagggtgaagggggaggatgcaaactttttatttcttacgtataatcgtcagtccgtcgcgcaacggcagtataactttctccacccgattatctgcggcaaccagatcattgaaggcttttatcccgatggtctgcaagtccgtgcgatgcggctgttcttcaagaacgtgcccgtcccacaaggtattgtcggcaatgatataaccgccgtccgaaaggcgtgccaataccatctcgtaataatcgatgtaacggcgcttatcaccgtcgatgaaagcaaggtcgaaagtgatgtccagccggggaacaagttccaaagcattacctatatagaactttatcttatcggcataaggcgagttctccagccacggacgggtaaagtcttcctgctcgtcattgatttcaaacgtatgcagcattccgtcgtccggcaacccctctgccatgcaaagcgcggagtatccgctatatgtcccgatctccaacacctgacggggacgtatcatcctgacaaacatcttgagcatacgcccctgcaaatgtcccgaagccatgcggggataaagcaacttgaggtgcgtatcgcgataaagagctttcagatagtcgccctcttcatcgatgtgttgcaggatatattcgtctaaagtcatataaattgagaattgagaattaaaaaacaaatgcctgccagcggactgtcattttttaattctcaatttataattttacaagtatctgttactgttcggaagtacactgtcttcagcatgtttcagggcatcttccactacgttgatttcgaggaaggatgtttgcgtaccggccttaccgctactcagatagcccaccatgtcggtaggttgcagacggccttcctgaagcaggcggcggagagcggcgaagtagtattcctgtccgttggcaagttcgggcatgtagatggcttctacaccgtatgaaagcgccaggtgacgcatggtcttttccttatagcagatggcgagcaccgggtatttgccgcggaatgcagcaaggttgcgggcagtgcggccgctgtaactgtcggtgatgatggcgcgaatcttcaacttcgtagtggcctttaccgcttgcttggcgaggaaagccgttacatcgttgctgttttcgtccaaaggaatacggatgtcgttatccgccagtttgtctttttccgcctgggcggcaactttcgtcattgtcttgacggcttcaaccggatatttgccgtaagccgtctcaccgctcagcatcaaagcatccgtacggtaatagatggcgttggcgatgtcggtaacttccgcacgggtaggacgcgggttggaaatcatggtatggagcatctgcgtggcaacgataaccggcttcttggcaaggatacatttgcgaatcagcaaacgttggatacccggaatacgttcctgcggaacttcgatacccaggtcgccacgggctatcataacaccgtcggccacttcgagaatctcgtcgatattgtccacaccttcctggttctcaatcttggcaatgattctgatgtcgctgttgtgggcatcgaggatagcctttatatccagaatatcctgtctgttgcgcacgaaagagtgagcgatgaagtcaatgtctttctcgatggcgtagaggatattgttgcggtctttttccgtcagtgaaggcaggttgatgcgtacacccggcacattgacactcttgcggctgctcaaggtagcttcattctgcacctcgcacagcaggtggtcggcattcttttccacaacaaccagttccaggtcaccgtcgtcgataaggatatgaccgcccacattgaggtcgtgtacaaagttgggataagaaacggagatacattcgcgggtagtctgccggtcgggattgcctaccacttttacacgatcgcctgccttgaagggaataggctcgtcaaggacagtcgtacgcacttcgggacccttcgtatccatgaggatagcgatgcggttggaaaccgtacgcacattggctatcagcttctcgaaaccttcgcggcctgcatgagccgtattcatacgtactacgttcaaacctgcgtcgaacaactgttttataaaatcaacatcgcaacgctgatcggaaatcgttgcaacgatttttgtctgtttcaatagcataatcttatacctattttatattaataattcctttaacgcttccaatgccagacggtaggagttcagcccaaagccgcaaataacaccccggcaggcacaagctatcatggatacgtggcgaaacgactcccgggcatgcacattggagatatgaacctcaatcaccggagcagtgaccgaccggatcgcatcttgcagggcaatggacgtatgggtataggcccccgcattcaggatgatgccgtccgcatcaaaacccacctgctgtatcttgtctatcaactctccttcgatgttggattggaaatagtctatctgtacatccgcatacttttcacggagtccggcaaggtagtcttcaaaagtaacactgccataaatggaaggttcgcgtttacccaacagatttatattggggccgttaataatctgtattctcataacacatttttttatacctttgtccacagagaacattctttcaaggtgcaaagataggaaaaagtaatgaaagtagaagagaaattgacgaataaggaaaaacgagcggtgataatcagaaagtatcagcaatatctcaggctggagaaagcgctttcgcccaatacgctcgatgcctatatgacggacctacagaaacttctgcactttctggaaggagagaatatagaaattccggacgtaacaccggatgatttgcaacgctttgccgcaggactccacgacatcggtatccatccccgttcccaagcccggatactctccggaatcaaatcgttcttccactttctggtgattgccgactatcaggaagccgacccgagcgagctgctggaaggtcccaaaatcgggttcaggctaccggaagtgctcaccgttgaagaaatcgacagaatcatttccaccgtagacatggagaagaaagagggacaacgcaaccgggctatcctggagacactgtacagctgcgggttacgcgtgtcggaactgtgtaacctgaaaatctccgacctctattttgaggaagggtttattaaggtagaaggcaaaggcggcaaacagcgtttagtacctatctcgcctcgtgcaatcaaggagataaagtattggtttgcagaccgcaacctggggaaaataaagaaaggatacgaggattacgtatttctggcacgatggggcaataatatctcccgcatcatggtgtttcacatgataaaagagctggcagaaaaagccggcatcaccaagaatatcagtccccatacgttccgccactccttcgccacccatctgctggaaggcggcgccaatctgcgggccatccagtgcatgttgggacatgaatccatcgccaccactgaaatctatacacatatcgaccggaacagactccgaagtgaaattatcgagcatcatccccgcaatattaaatacaggaaagagcatggcgtttattaaattataataaatgtgatagtattattaacaaattgccaagagaattaatatctttgcaaagctatatatataggaatatagcaactaattgtgaatggacaaatttcaattacaaacaattaatttatatctaaaatgactaaaaaattgtatctgcctttgttagtggcacttgttgctgttttgacatcatgcagcagcaaaatgggtgaactgtcttctgactatttcacagtgactccgcaagtattggaagccgtaggcggtaaggtacctgctacaattaacggtaaattccctgaaaagtatttcaagaaaaaagctgtagtggaagttactccggttttgagatgggaaggcggcgaagctaaaggtcagcctgccgtattccagggtgaaaaagtagaaggcaacgaccagactatctcttacaaggctggtggtagctacacaatgaagacttctttcgactatgttcccgaaatggctaagtctgaattgtacttggaattcaaagctaaagtcggaaagaaagaagttactatccctgctgtaaaagtagccgacggtgttatctctacttccgaactggttggccagactttgggcagcgctaatcctgctaacggtgacgacgctttccaacgcgtaatcaaagaaaaatatgatgcaaacatcatgttcctgatccaacaggctaacatccgttcaagcgagttgaaaactgccaaagcattcaacgaagaagttaagaacatcaacgaagctgccaacaagaagatcagcaacatcgaaatctctgcatacgcttctcccgatggtggcgttgagctgaatactggtctggctgaaaaccgtcagaacaacacagccaaagttatcaacaaggatttgaagaagagcaaaatcgaagcagctgtagatactaaatatactgcacaggactgggaaggtttccaggaactggtcagcaaatccaacatccaggataaagagttgattctccgcgttttgtcaatgtactctgatcctgaacaaagagaacaggaaatcaagaatatctcttctgtatacagcactttggcagaagaaatccttccgcaactgcgtcgttctcgtctgactttgaactatgacgtaatcggtaagtctgacgaagaaatcgcatctttggctgacagcgatgctaagcaactgaacatcgaagaactgctgtatgcagctactctgactaacgatcctgccaagcaagaagctatcttcaccaaagctactcaaatctacccgaacgactaccgtgcatacaacaacctcggtaagttagcttaccaagccggtgatttggacaaggctgaaggctacctgaagaaatctctttctatcaaggattctgctgaagctaacatgaacatgggtctcgtagctttgagaaaaggcgacaaggcagcagctgaaacttacctgggcaaagcttccggtactaaggaactgaacgaagctctgggtaacctgtacatcgctcaaggtcaatatgacagagccgttaacgcatttggcgacactaagaccaacagtgcagctttggcacaaatcctggctaaggactacaacaaggctaagagcacattgtcaagcatcgctaaaccggacgcttacactgactacctgatggctgttgtaggtgcaagaaccaacaactcttctatggttatggacaacctgaagaaagctgttgccaaagattcttcattggctaagaaagctgcttctgacttggaattctccaaatacttcacgaatgcagacttcatgaatatcatcaaataataaaggttataagatgaaaagaagtgcccggcatagaaatatgtcgggcatttttttttattcacaccaaaaagaactactttcgcagcaacgtatcagaagaagaaagccgtatgaagaatatttatcttgcatatttcctgattatcatgctatccgcttgcggtggcaaaagctccgacacagtcagtctgagcggagaaatcaaaggtttgggaaatgacaccttatatatatacggtgcagacgaaatgtacgaccgcatggataccctgcccgttgagaacggcaaattctcgaaaacactctctccggataccttggtagctgcatggctgttgttcagcgacggcagccgataccctttcttcatggataaaggtgacaaaatacacataaaaggctctgctgccgaactaaacagtatggaaataaccggcaacccgcacaatgaagagttgaccgccttccggaaagaactgaaaggattgggcaaaccgtctgaaaaagtcctggaagagaaagccggcaaatttatcaatgagcatcattcctctttagcgagtatctacctgcttgacaaatacttcgcacaaaaaggaaaaccggattataccctaatcaaacaactgaccgagcacatgacgggagaactgaaagaccgtccctatatcgacgggctgctcgaccgcatccaggaagaagaaaaggctacgaccggaaagactgccgcctacttccgcctgcccaacgccgaagggaagcagataacccgttcgaacttcaaagaccaatacctgctaatacacttctgggcttcctgggataccgtgagccgcgacagcaatgctgtttaccgcagaatctacaggaaaggacaaaagaacaagaaattcgcgcttttaggaatttctttagacctcaacaaagacaattggaaaaaggctatcgaaacagataccctgaaatgggagcaagcatgcgacctttccggctgggagaccggagttgtaaagcaacttgccataagaaccctgcctgccaatgtactgctcagcccttccggaaggattgaaggaaagaacctgagcgaaacggctatcgaaaagaagctgaaagacatagaagaacaagagaagaaagaaaagaagagggagatagagaacgaaaggaaaaagaaacgataacttttctatcggtaatcataaaccctaatcactaaacactcaaattacatgctcatcaaagtttttggagcggctgttcaaggtattgatgcaaccctcatcactatcgaagtcaacagctccagaggctgtatgttctatctcgtcggcttgccggactctgctgtcaaggaaagccaccaacgcatcatttccgcactgcaagtaaacggttaccggatgcctaccagtaatatcgtcatcaacatggcaccggctgatatccgcaaagaaggcgctgcctacgacctgccgttggctatcggcatgttaggtgccagcgaagtaatcaaaccggacaagttgagccgctatctgttaatgggagaactaagtctcgacggcagcctgcaacccattaaaggcgcactgcccattgccataaaagccagagaactcggttttgaaggaattatcatacccagacagaacacacgggaagctgctgttgtaaataacctgaaagtttacggagcaaagaacctgaaagaggtcatcgagttcttcaacgacaaacaggaactggagctggtacatgtcgacacccgtaaagagttctatacccggcagaatgactttgatctggatttctccgacgtgaaaggacaggaaaacgtaaaacgcgcgttagaggtagcggctgcaggcggacataatattctactgataggtgctcccggcagcggaaaatccatgcttgccaagcgccttccctctatcctccccccgttaacattgggcgaaagccttgaaaccaccaagatacactctgttgcagggaagctggaacaggaaagcggacttatctccaaacgaccgttccgcgctcctcaccacacaatttctactgtagccatgacaggaggcggcagtttcccacaaccgggagaaatcagcctggcacacaacggagtcttattcctcgatgagttgccggagttcaatcgaaatgtacttgaagtactgcgccagccgctggaagaccgggaaatcagcatttcccgaattaaatgcaatgtcaaatatccggccagcctgattctcgcagcatccatgaacccctgcccttgcggatactacaaccatcctaccaaagcctgcgtatgcagcccggggcaagtacagaaatacctgaaccgcatttcgggacctttgctcgaccgtatcgacctgcaaatcgaagtcatccccgttccctttgagaagatgtcggatgcacgtcccggtgaatcgagcaccctcattcgggaacgcgtagtacgcgcacgtcagacccaatccgaaagatatgccgaaattcccggtgtatattgcaatgcacagatgaacagcaaattacttgcccgttatgcccgtcccgatgataaagggctggcactgctgaaaacggccatgaaccgcttcaacctctcggcacgcgcctacgaccgcatcttaaaagtctcacgtaccatcgccgatcttgagggctgcgaactgatacagccctcgcatttggcagaagcaatcggatacagaaacctggacagggaagattgggccggatagccctgtatcagtcttatatagccctctttttcagtttaaagactacctctctgtcatctttaccttcatacctgccgtttccacctttcggattcatctttatatccacagaatcggtctggtaaaccccggtaaggtcctcacagataatacggaagtcctgataaccggttatggtattctgataaagatactctccgttttctttggtataaaccgtatcggataaaacagcatagccatatgaaccgtcggcaggagaagctatatgctttaccagaattctggcatcgggcacaacctgccggctctctcccagtactttacctctgaattcatatttggcataagaagtacaattctcacttcctgcccccatactgttttcatcgcaatatgcgaaccccaataaaatcaatgcaccgaacatcacgccgttgaaaattctaagccattgttctttttctctcttcatagtgtgtttatagtctaagttatatcctataaacgcctatcccaacaaaatactgcacaacaacccgacttttaacgtataatcagttcttttctattctgatgcgggcatccactgctattacgtacttttccgtggccaacaacggattgatatccatttccttaatttccgtagcaaagcgcagcaaagtggacaagcggacaataatttcggcaaacctgtcctcattcacccctttctgcccgcgcgtgccttttattatcttataggcgcgcaacgaatgaatcatcgaataagcctcctcataagacaaaggagccagaccggaggatacgtctttcagcacctccacaaagataccgcccaagccgcaaagcactacatgcccgaatttctcctcatacttggctccgataaacagttccgttcctttcaacataggctgcaccatgatacccgttacttccggaatctgcatcatccgttcaaactccaacgccagatgctgttcactctttatattcagtaccacaccgcctacatcggatttatgcacaggccccaccacctttgccactaccgggaatccggcacgacgggcaaatgcaagcacctcttccttgtttgcagacacaaactcctccactacaggaataccggcagaatgcagcaaagcctgcacgtaatgcggttctatataaccgttttcagggatggaatcaatgatgcggcggatgcgcggaacatccacgccaaacagctcaatttcattatttgccggtttcgaggcattcataatgcgcgacaatgccgtacccaacgtcacttcatcggcaaagttcacgtgacctttggcaaggaaagcggccacttcggctcctgccgtattaatggacgggagaatagggaatatcggtttcctgcaagcctgcatcttctcatgcagcacatcgtacatttcgaacatggtgaccagtcccggcgtaccgaaaatagccattaccgcatccacattatcaaacttctcctcgcaatattccaaacaaagccgcagatgctcaggcgtacccgtagctaaaatatctatcggattaccaacagcagctcccggaaaaagcttgcttttcagctcttcggcaagctcaccttccagtttcggcacattcagtccgcccttgctcaaggcatcggtcagcatcacccccggtccgccggcatgggtgataatggcaaaattctttcctttcagttccggcaaagtaaagatacatcctaccgtagtcaactcctcacgggagtagcaacgtacgatacccgctttacggaacaaagcctccaccgccgaatcggaactggcgatagctcccgtatgcgaggatgccgcacggctgccactctcactgcttcccgacttgatagccgcaatcttacatccttttcttatcaacgaagaagcatggaacagcaatctgtcagggtcgcctatactttctatataaagcagttttatcctggaatcgttttcagcatcgaaatgctcgtccatatattgcagcacatcttccactccaatctgtttggcattgcccacagaccatacggaactgaactgcaagcctttggtaaccgcgctctccagaataaacaccgcagtggccccggaactggaaatcaaatcaacaccctgcgggttcaaattgggaataggctggctgaacacgctatgatgccacgtattcatcagcccgatacaattgggacctatcaacgaagcgccgtacttattcactgtttccagaatacggtcttccaacaacgccccttcatgcgtttcctctccgaaacctgcagagagaatgatgaacgcacgtacctgcttttccgcagcaagcaattctaccgcatccggacaaaaagatgccggtatggcaagtattgccaagtccgtatccggaatatcctttacatcagcatacgctgtaacgccctgtacttctgtttctttcggattgacggcacgcagttctccggtataaccgccattaatcagatttctcaaaatagctccaccgggtttatgtacattgttggaagctcccaccaccacaatactggcaggacgcagcaattggtttgttatcatagtctgttcatattagtaaagtacgacaatcgcacaaatatacaatttatatacataatgacaagaagataaccttttaatattaccgtatccttgttcttccaaagacgaaatattccggacacgaagtatatagggctctttttgtaggtttaagagaaaaccgttatctttgcactgcttaaaagtgttcataacaaaagagatacatagatacaatggaaaagaaattcaagcgtaccaccgtgacatcggcgttgccctatgccaacggccccgttcatatcggacacttggcaggggtgtatgtacctgccgacatctacgtccgctacctgagactgaaaaaagaagacgtagtctttatcggcggctccgacgaacacggagtgcccatcaccatccgtgccaaaaaagaagggattacaccgcaagatgtagtagaccgctatcatacgcttatcaagaagtcttttgaggaattcggcatttcgtttgacgtatacagccgtactacttcaaaaacgcatcacgatacagcttccgaattcttccgcaaactgtacgataagggcgaattcatcgaaaagaccagcatgcaatactacgacgaggaagccaagactttccttgccgaccgctacatcaccggcgagtgtccgcattgccacgcagagggcgcttacggcgaccaatgcgagaaatgcggtacaagcctcagccctaccgacctgattaatccgaaaagcgccatcagcggcagccagcccgtaatgcgcgaaaccaagcactggtatctgcccctcgacaaacatgaagcatggttgcgccagtggatattggaagaccataaagaatggcgtcccaacgtgtatggccaatgcaagagctggctcgacatgggcttgcagccgcgtgccgtgagccgcgacctggattggggtattcccgttccggtagaaggcgccgaaggtaaggtgctttatgtatggttcgatgctcccatcggttatatcagcaataccaaagaactgctgcccgactcttgggagaaatggtggaaagaccctgaaacacgtctggttcacttcatcggaaaagacaacatcgtattccactgcatcgtattccccgccatgctgaaggcggaaggcagttatatcctgcccgacaacgtgcccagcaacgagttcctgaatctggaaggagacaagatttccacttcacgcaactgggccgtatggttgcacgagtatctggaagacttccccggcaagcaggacgtgctgcgctatgtgctcactgctaacgctccggaaacaaaagacaacgacttcacttggaaagacttccaggcacgtaacaacaacgagctggtagcggtatacggcaacttcgtaaaccgtgccctgcaactcaccaagaaatacttcgacggtgtagtgcccgctgccggcgaactgaacgactacgaccgcgaaacactgaaagagtttgccgacgtaaaagaagaagtggagaagctgctcgacgtattcaaattccgcgatgcgcagaaggaagccatgaacctggcacgtatcggtaataaatatctggcagacaccgaaccctggaagcttgccaagacggacatgccgcgtgtagccaccatcctgaatatctccctgcagctggttgccaacctcgccatcgctttcgaaccgttcctgccgttcagcagcgaaaagctccgcaagatgctgaacatggacagcttcgactgggcagagctcggccatacagacctgctccccgccggacaccaactggcaactcccgaactgctgttcgagaagattgaggatgatgttatccaggcacaggtagacaaactgctcgccaccaagaaagcaaacgaggcagccggctacaaagccaatcctgtcaagcccgttatctcattcgaggacttcgagaaactggatatccgcgtaggaaccgtattggaatgcgaagccgtacccaagatgaagaagctattgaagttcaagatagccgacggactggaaaaccgtactatcgtcagcggcatcgcccagcactaccaaccggaagagctggtaggcaagcaggtactgttcatcgccaacctggctccccgccaattcaagaacggactggtgagcgaaggcatgatactttctgccgaaaactatgacggctcactggcagtaacctcactgttgcgtgaagtaaagcccggcagtgaagtgaaataatccgtatgagcgagtcttcactgaaacaaaaaacaataggagcattgctctggaacttgctggaccgtatgggccagcaagttctgttgtttattgtcggtatcctcgtagccaatatactctccgtcaaagactatgcgctggtagggatgcttgccattttcagcgcaattgccaatatcgtactggacagcggattcagtgccgcactcattcagaagaaagagacgactgcagaagagttcagttccgtcttctggttcaatctgggaatgagtatcctgctgtatggagtgctgatgggctgttccccgctgatagcccgcttctttaaccagcccaaactggtggaactgtcggctgtcatttttctggcacttcccatcaatgcgctcactatcatacaaagcaccatactgaacaagcaaatccgcttcaagccgttgacgcaaataaacctatactccatgacggtttcgggcatagcctcgcttgccatggcactgaccggctgtggagtatggacattggccctgcaaccggtaatactggcagcagcgcgcgccaccctgctatggagccgcgagaactggcgtccgcaacggactttccgcttcgcagtcatacggtcactgttcggattcgcttcaagcctgttattggcaagcctcatcaatacctgcttcctgaatatctattccgttatcatcggcaaactgtttccgcaaaaacaattgggatattatacgcaaggaaacaaaatgtgcgatatgggtgtcagcctgatttacggaagtatacagaatgccaccttccccatattcagtaccatccagaacgaacgggaaaggctgataagggcttatcgcaagaccatccgttttacggcattcatcacactccccatcatggcaggtctgttcgttacggcaggtcccgttatccgtttgctgctgaaagaggaatggtggccttccattcctttcttccaactgctctgtcttggcggttgcttcaccatactgactgccatcaacaataatttcattaaagtaagcggacgttcggacggcatacttaaaatagaatattacaagatagccttcaccgtggcagtagtgctgcttacctatcgggaagatgtgctgacgatggtagcaggccttgtagtcacccgcctgctggtatacattatcaatatgatttacaccgcccattacacgggataccgcttttccatgcaacttatggatttactgccatatgcaggactcagcattctgatgaccttattgctactgcccattggcggatggatagagaaccagttgctactgctcgtcacacaagcggcagccggcacggtcatttatataggtacggcctatatcaccggttcgaagatactgaaagactcgctggaattaatacgaaagaaaaaaggacatgaacaataataccagacttaaagtcagcgtcctgatgctcacctacaatcaggaacgttacatcaacgaggccatccgcagcgtaatgctgcaagagacaaacttcccctttgaactggtcatagggaacgatgctagtacggactgtacgggaacgatttgcgcggactggcaaaaaaagtacccggaacaaatcgtcctattcaaccggaagaaaaatctgggactgcaacagaacttcatacaaacctacgcccaatgtcggggacaatatatcgccatctgcgagggcgatgacttctggacagacaaacggaaactgcaaatccaagcagattttctggatacgcatcccgactattccacctgttttcaccgggttatcaactactacgaagaccgcggaaccaagagcctcagcaatggcgggcagaagcaggatacagacatatcagaccttgcacgcagcaattacatctccaacgtatccgctttgttccgccggggcttgtttggcgaactgcccgaatggtttgcccgtgccagcacctacgactatgccatacatttgctgaatgcacaattcgggaagatacattatataaagcgtccgatggccgtctaccgccaacacggaaaagcaatctggagtgaagccggaacagaccggaaactggacatcgcactcgttgtccgggagttgctaatggattattttaaagaaaggaggactgacgtatacgacaatctccggcaatcccatgcgcagatatgcctgaacctcatccgccattacaccggaaaaggacagcaagaacaaatagagcatacggaaaaacggcttctgcaatatcaaccgcagtggactatggaagatgtgaaacgtatggaattgccccgcccgcaatcagccacacaaaggctgacaggatttgtcaaaggcatgatgaaacggggaagagccgccgtttccagagtgataccgttaccgcacatctgacacgtccgacgaaaacgccccatccacacgcaaagaggacattacaggaatttcccaaccgtcttttccagcacaccgttatcgctcagcagcttctccacaaactcgcgaaaagctccataaccgccatgtgcggccgttacatactttacctcccgcttcacatattcgggcgtattgctgggagaggcgctgtaacccaccagacgcaacagtggcaaatcattcaggtcgtcaccgataaaggcaacctcgcccaacgaaatgcccaattcgcggcataactcctcagcctgcgccactttatccttgacccctaaataacaatagtcgattttcagcttatcggcgcgcttctgcacgatttgcgtattctcgccggtcataatggcaacgggtatatctaattcgcgcagaaaaatcactccccagccgtctttcacggaaaagcgtttcataacgtccccttcggcagtataatacattccgccgtcggtccatacaccgtcaatatcggtaataactaatttcggtaacatgcctgttatttcttttaagattaagaatgtaagaatatctattgcccacgctctcccaatttaccgcgttttccgtcacgatagccgtcccacagagctttccatttggctatcttctgcttttcatacaacagcacaaagacaatccgtttatatagatggtagcgtaaatgggctttcaggttcaggctctcaggatagagtctgtgaagtaccatgccattgcgcacattgtaataagtacgtgccggcggatactcgttcggaaaaacctccttacccagcaagcggtgtttcttcttctgataccccaaatcgtgttgcagcaggatatttttgaaacaaaccgtccgtactcctttacgcgctgcacgccagcagtactcgcagtcgatgccccatacaaacaactcttccataaaaacgcccagttcttcgaacaagccgaccggataaacagtaccggaagtcatggcggaagagacctcatccaccctgtcggcaacgggataaagcgaagcctgctgagactttataaaataattgacggagaaaataacccgcttttcttccccgtaactccggatggcagccgtataatcccggaaaactcctggcaggaagtaactgtcctggtccaatgtcagaagatgcgtatatccatgctcgcgggcgtaagccacggcatcattcagcgcagtgccgatgcctacattccgcccgcaccccctatattccagacgctccggatgagtgacgcccgacaaaggcaactgttcccttccgcctccgggcgtattatcccacaacagcaatctgtctgcctgcgacagataactgttgatattcccggccaaatccttaccgggatgataaagcacaacaacggcaagcagtctcattcctcaatcaatgacggataaataatctcgttacgcggtatctccttccgtacccgacggcctaccaccttatctcgttccgcccacttaaagccgtcgcccggactaagcaggtgaatatcctcttccgtgataatatcgccgggatgcagcgccttgttcgtagcaatggaacgctccagtttcactttggcggcagagacggcagggtcgatatacagttcctccctgcccagccaatgctcggcaatgcggatatcacgaatcatgcggttcacaccgtccggtcccagagaaccttgctggtccgttcctttcatgcggcggtcaatggtgacgtgcttctctataatctccgcacccattcctacggcaaccaccggagcggcaatgccaatggtgtggtcggaaaagccgatatggtattgtccgtaatgctgtttcagataagttatcgttctcaggttcaggttatcgggctgagtgggatactgcgatacgcaatgcagtatggatatatcgttgtgataacgggtgataacctccaaggcatcgtccagttccttcttgcctgccataccggtggaaaggatgataggaatcctggtttccgccatcacttccagcaacggcaggttggtaaggtcgcggcttgccaccttgaggcggtcgggcgtaaagagcttcaataaagacatgcagccttttgagcacagtgtttccacgaagtccaggcccaatgacttggcatgcttgtaaacttcaaaatgctcctcatccgtcagttccagataagcgcgatgctcgccataggtgcgtccgaaagagtggggagagtcgtacggacggttcatctgcgaatcggtcagttcttcattcaaatcccgcttggtcatctttaccgcgtccataggacggagttccagattaaagacttcttcgcgtacgggacgtgacaccaggtcgacaatcaacttggcgatatcgacggaaccgttatggttctgtcctatttctccgataatgtatgtactcttcattcggcaactgttatttttgtttactatcatcaaatctatcttccttccctgccacaatacactgtagaaagggggacaatgagtcagggagtgaaaggcactcagtcagggagtcatccccctttcagtcagtggctgaatggagtccggtcagcgactgtttccggcctcttcccggcagcataatcttttccttttccaagaagtctccctgcgataaagccggagcttatttcttatttttcgtttttcgctatattttccagcattttgaccctatactccggatgtgcctccaccaaccggagcagtgcatggatgctgtggtcggtctgctcgcagaaagcggcgtaaagctcttgcagcaaggtgaaatcctccattgtatcgagcgtaaagcgaagatccaaccgcccttccagctcatcgggcaacggaagcaggcgaacgctgaacgcttcgggatgtgtatagagataaatcgtaacgtgctctatgtacagtttttcctgtgtagcggcggctgcacggcgcagggcatcggcagtcgtcagctcggcaaacaagcccaaatgagatttgatagtggggcggccgtctgcaaaaccgtaagcgatataatctgccgggcgggcatcgtgctcctcgaagaaagcccggaagctgtcgggacgcaggaaaggattgtccgaacagacacggataaagcggtcaaggttgaatgttgcggcagcccggataaagcggtcgagtacattgtcctcgtctccccggtagcaacagatacctgcttcgcgggcaacctctgccagtatatcatcctgcggacggtcggtagtggcaagcacaatagtcttaccggcgcaggcctgcttgatatttccgattaaaatgtcgataatgcgctgcccgctatagaaagggagcagtattttattatgcaaccgggtagaaccggtacgtgcctgaatgatgattccgtctttcatactttcattcgtttaaaagcgtctatataactgcccggcgtaacgttgatcacttccttgcccaaccggcgcgcataggcttcgagcacgaagtaggacttaaaggccacatacatgtggtagagtatcgtataaagccgtgcgctatgcagattctcctgcgtcaccgttgccgcctgcgacttattctggtcatagaaatgtttttggtgcatcagtaccacgttgtcgtccgtcaccgtgatttccggcaaccaggagtgatcggcgcctgccagataaattttcttgaaaggcagacgcaacccgatggcaatagaaggaatcagtacgttgtgcggacggggcacaccccaacccttagcgaatacccagttgcagaatccctgcacaccttctatcggggtggtattgtaaatgcagaggcggatattcctgttacccgccaacataggctgccactctttgttcttcaaagcacgggcgggaataaacagactcatcggccaagcagttttttcggcaagcgtccggaacaattgtacccgcttctcgggaacaatccagaacagagggtcggctatcagatatatctctgggcggagctgctcgaacatcggggaagtaacgcaaaaattcaccgccagcagcgtcttgccctgtacaaagtccggagcttcccgaaccgtacggttcaatgaaggaccgttggcaagtatcaacagctcttccggattactgaacgacgacggtaggtgcgtacgccatttggattgtagcagaatcttcaccacgctcaggaaagtctgccacagttgctccagctttttcattcctttatctcccatattcacatttattttctaccgatgaaccataggtttcttccggcgaaaaactcgttttccacgacgttcaatccgttgctcagcgcaacatctccactgctcccggcattacgagcttttaaccacggcaaagatagggagtttagcggttacagactaaaaaaataaaagatttatagagcagaaagcggcaaaagcagtacttttgtccaaacattccgcaaaaatgagagtactattaatcaatacatccgaacgcatcggcggggcagccgtagcggccagcagactgatggagtcgctcaagaacaacggcatcaaggccaaacttctggtacgcgacaagcagaccgaccaaatcaccgtggtttcattaaactacaactggcgcatgatatggaaattcgtatgggagcgtatcgtcatatggaaagccaaccgcttcaaaaaggagaatatctttgccgtggacattgccaatacaggtacggacattacctctcttccggaattccagcaggcggatgtcattcatctccactggataaaccagggaatgttgtctctgaagaatatcgagaaaatccttgcctcaggcaaacccgtggtatggaccatgcacgacatgtggccgtgtaccggcatctgccaccatgcccgcgagtgcacccactatcagcaggagtgtggcaactgtcctttcatccacggcaacggcagcagaaaagacctctcctaccggactttccgcaagaagcaggagttgtatcagggacggcacattaatttcgtaacgtgcagccactggctggaaggactggccaagaaaagcgccctgctcgccggacacacgattacctgcatccccaaccctatcaataccaacctgtttaagccgcacaacaagcaagaagcacgcaacagatgccaactgccgcaggacgccagactcgtactgttcggctcggtaaagataacggacaaacggaaaggcatcgactatctggtagaatcgtgcgcactactggcggaaaagcaccccgaactgaaaacgaagctcggtgtcgtcgttttcggcaaagagtcgcagcaactggccaacttgctgcctttcaaggtctacccgctggactttgtgagcaacgaacaccagttagtaaacatatacaatgcggtagacctcttcgtcaccccttcgctggaagagaacctgcccaacatgattatggaagccatggcatgcggcattccctgcgtcggcttcaacgtgggcggcattcccgaaatgatagaccacctgcacaacggatacgtggcgcaatacaagtcgtccgaggattttgccaacggcatctattggacactgaccgacccggattatcccagcctcgccgagcaggcctgccggaaggccgtcacccactattcggaaagcgccatcgccaagaaatatattgacctgtacaacaaagtcaccggaagaaatgcataaccatcccacccccaagttcagcgtcattaccgtgacctacaatgccgaggctgtattggaagataccatccagagcgttatctcgcaaacctaccgccacgtggagtatatcattgtggatggagcgtcgaaggataagacactctctatcatagaccgttataaggatcacatcgcaaaggtgacaagcgaacccgataaaggcctgtacgatgccatgaacaaaggcatccgactggctacgggcgattacctctgcttccttaatgcaggcgacagcttccacgaagacgatacgctgcagcaaatggtacatacgctgccgggaagcgagctgcccgatgtgatgtacggtgaaacggccctggtggacaaagaagggcatttcgtacgtatgcgccgtctttccgccccggaaacgctgacgtggaaaagcttcagacaagggatgcttgtctgccatcaggccttctttgccaaacgcactttagtagaaccgtataacctgaagtaccgcttctccgccgactttgactggtgcatccgcatcatgaaaaaggcacacacgctgcacaatacccgcctcacgataatagactatttggacgagggcatgactacccaaaacaggaaagcctcgcttaaagaacgtttccgcattatggcgcaatattacggtctgataagtacggcagcctatcatgcctggttcgtactgagggcggtactgaaaaaataatccgtacagcttgaaaattgtatgtgccacttcattggcaatcttgtgccagcatataggcataagcgtgccattaaagtggcacatacatagactgtgaacggcacgcctaaggtttaagcaacgagcgcaactcctgcacgccttccgatgctcctttttgaattacatgtatctgccgcatggaatgtacatccaccggcttagggtctatcaggtacacttcggcatcgcgaggcacatagttgagcaatccggcagccggatatacattcatcgaagtaccgataatgacgaatatatccgctttctccacataatccacagccgtttcaatctcaggaaccgactcgccgaaccaaacgataaacggacgaagctgagtaccgtcgccggctttatctcccaacttcacttcgtactcatccggtttcagttcctttatgtagtgcggattataagggtcgcggctggaacagacctttgtcagctcgccatgcagatgaatcacgcgtttgctcccggcacgctcgtgcagattatcaacattctgcgtaacgaccgttacattgaagtccttttccaactctgcaagcccgatgtgtccggcattcggctttacatccagcaattgcttgcgacgctcgttataaaagttgataaccaactccggattacgggcatagccttcgggagtcgccacctgttccaccggatatttatcccacagtccgcccgcatcgcgaaaagtactgataccactctcggcgctcatacctgcaccggacaaaacaaccaagttcttcatctttatatctccttaaagttcatatagtcatacaaatgtatgaataataccccaaaagagggaagttattttcacttactaagattttttaatctgaaaaaaacaaaatcattcaaataaaagacgtatttttgccattcattaatttgcaataggctggaaaagaaatgatttcagccgccaacaaaaacattttatggataaattcagttatgctatcggccttggaataggtcagaatcttttaagtatgggtgctaaaggcatcgcagtagatgactttgcacaagcaatcaaagatgtcttggaaggcaaccagacggctatcagccatacggaagcccgcgaaatagtaaataagtacttcgaagaactggaacagaaaatgaatgccgccaatatcgaggccggcaagaagttccttgaagaaaataaaaaacgcccgggagtggttacgctgcccagcgggctccagtacgaagttatcaacgaaggcaacacaggcacttatgccaaagctaccgaccaggtacaatgccactacgaaggtacgctgattgacggaacactgttcgacagctccatcaagcgcggccagcctgccacattcggcgtcagccaggtaatcccgggttgggtggaagccctgcaactgatgcccgaaggcgccaaatggaaactctacatccccagcgagctggcttacggcgcccagggagcaggtgaaatgattccgccgcacagcacactcatttttgaagtggaactacttaaagtattaaacaaataattttaaaagcaaaatgaaaaaagtaacatttatcatggctcttgcagcagctgccggtttggcatcctgtactgcacaaagcccgaaagcgaacctcaaaacagacgttgactcattatcttacgccatcggtatggcacgtaccgaaggcctggatcaatatctcgcacagcagggtatcgattctactcaaatgacagacttcctgaaaggtttcaacgaaggtgcaagcaaaatcgacaagaaagacgttgcttacatggcaggtctgcaaatcggacagatggtaagcaagcaatgggtagaaggcttcaaccaacagattttcggtggagactctacacaaaccatcagccgtgaaaacctgttggcaggtttcgttgccggagttgtaggcaaaggcatcatgaccaaagaagaagctcagactttcatgcagacccagatggatgcagtaaaggctaaagccatggaaaagaaatacgccgacaacaaagctgccggtgaaaaattccttgctgaaaacaagaccaaagaaggtgttgtaaccactccgagcggtctgcaatataaaattatcaccaaaggaaccggtgaaatccccgctgatagcagcaaagtaaaagtaaactacaaaggtacgctgattgacggaaccgaattcgacagctcttacaagcgtaaagaacctgctacgttccgtgccaaccaagttatcaaaggctggacagaagccctcactatgatgcctgtaggttctaagtgggaactttacatcccgcaagaactggcttacggcgcaagagaaaccggcggcccaatcaaaccgttctctactctgatttttgaagtggaactggtaggtatcgaaaaataaaacgatcatgccataaaagcgatagggcggtgaagcgacgatacttcaccaccctattccattatccccctaccactttatcaccttgtcatccattatcactttatcaccttattaccctatcactttatcgtattatcacttttattctttttttcgctccattctacagataaattaaaataaagtcctatatttgcttactatttgataagaacaagaactttacttatttactattatggaaaaaatagacaatcttgaccggcagattctggaaatcatttcccaaaatgcccgtattccttttaaggatgtagctgctgaatgtggtgtatcacgtgccgccattcaccaacgcgtacagcgcttgattgatttgggcgttattgtcggctccggctaccatgtaaaccctaagtctttgggctacaggacttgtacttatgtaggaatcaaactggaaaaaggctccatgtacaaggctgttgttaccgagatgcaaaagattcccgaaatcgtggaatgtcattttaccaccggtccgtacaccatgctgaccaaagtgtatgcgcgtgacaacgaacacctaatggacttgctgaataacaagatgcaggaaatccccggcgtcactgcaacagaaacattaatttcactggaacaaagcatcaagaaagaaattcctatttgcccggaaaagtaagataaataaaacaatggggttgtgccgaaacaaaaaacacttattatttgttttgacataaccccatgatttcatcaccttatcactttatataaatatggatttcttaaacgaatatcacctgtcaggacttgtaatcggtatctgtactttccttatcataggcatcttccaccccatagtagtaaaagccgaatattattggggaactaaatgctggtggattttcctattgttgggaatcggcggtgccattgcttcactgtataccgacaatattttggtagcctcactgctaggcgtattcgctttctcttcattttggaccattaaagaagtatttgaacaagaagagcgggtaaaaaaagggtggtttcccaagaatcctaaacgaacatataaattctaaacaaaaagcattcgcatttttatctgaaacgcttgcatatttcaagagaaaatactacttttgtccccgctatccgatataaggatacaccggacttgtagctcagttggttagagcaacagactcataatctggaggtccttggttcaagcccaagctggtccacactgaaaatcaggcatttacaagcaatcgtagatgcctgatttcgtttatggtgaccttcaggtgacctttttaaaaccaaactttgaaaaagtgaccttttgagatttaatgcaatccgaagaaaattcatgtaacaaccacacgcttttaaaacgtttcatgctccattgtgcaactagtttcttgctaatgaaaaaacaattccccaactttttaattctcataccaatcctatagttctcttagtttggattatatttcgtatatttgtctgataatgaaaaacgagtgcagttctcaaaactgataagactaaaagcacacgcattttattaaacctcaacatgactatatggcaaataccaacctaaaagaagctaaagcggctaaaaacgatgaattctatactcagtttcatgatattgaaattgagatgaatgcgtatttggaatacgacccgaatgtttttcgtggaaaaacgattttgttaccctgtgacgaccctgaatggagtaactttacccgttactttgcagccaagtttgatgaattgggcttgaaaaagctcatctctacaagctatgcaccagatgcaaaaaaaatgaagttattgacagaaccttctttgtttgaaacagaagctccacagtttgatccacagaaagcacagacaaaagggaaaatctttgttcttgaaaaagatcatacgggtgatggacatatcaatattgatgacttagagtgggagtatttggaaggtgatggtgattttaaaagtaaagaagtcactcgacttcgaaacgaagctgatataataattactaacccccctttttcactatttagggagttccttgcatggataattgaagctcataaacaattcattataataggtaatatgaatgcaatcacttacaaagaaacatttcctttaataaaggataataagatgtggcttgggtattctattcatagtggagatagagaatttcaagtcccagacgaatatcctttgacagcggcaggatggagaatagatgataatggacggaagtttattcgagtgaaaggtgtacgatggtttactaacattgatcatggtcgccgccatgaacctcttccccttatgactatggctgataacttgcgcttttccaaacacaaggaactgaaaggtaaagcctcctatgaccactatgataattatgacgctatagaagttccatttaccgatgctatcccctcggattatgatggtgtaatgggggtaccgatctcgttcttggataaatattgcccggagcaatttgaaatcttaggtcaaactcaaggagattctggacgggaacttggtttacgtccatatcctcgtgaattgaagaaattaaatccaagtttacgcgatggccaactatattacatggaaaatggaataccacaaaaaccatatgcacgtgttttaatcagaagaattagtcactcatgaagccttttgaaatattagggataggcttagaactagctgatatgtcaaaaatcaaggccaaattagggaaactcaatggcggaccaaggctctacgttgaacgtgatggacaacttgtccgactttatgagagggtactaattcgtaagattttgaaatattagggataactgataggggtaatgaatggggattaaaaaaccaagaatacactagtgcagactctcctaattgcaacgatcttaatcgccgaggtgctattttaagtaatggtgtacttatttcaacatatgctagattgctcataaggaggattataagttaatgtgcttaattaaaactctagcataaacttgagtatagtattttccactaacaatgtaataagtttcgtttgtaggaatctcattatgaagcaatacagcaccatcattaagtttcgttactttcgtttctttgccatgacggtccacttgaatctgctcaggatagaccttggaagcactgccataccaagttttagttatccctaatatttcaacttaaaacaaaaatattatgaagacaattttacatactgaatggaccgtagcagatatctgcaaaggttttgcatataacgaacttgaagggaaagggttgtttggtttagatggaaaactaaccattcaaccggagtatcaacgtcattatatttacaatgacggaaagcgtgatgtggctgtcattgagtctctgctaaaaggatatcctataggtttgatttattttaatcgaactgctgacggaaggtttgaagtgcttgatggacagcagcgcattacttccatcggtcgctttttaacaggaaagttcgctattaaggacgaagccgataatgtacagtacttttccgggcttccagaagaattgcagaaacgcatatgtcaatcgtctttgctcgtgtacgaatgtgagggtgaagaaaaggaaataaaagaatggttcaaaaccatcaatattacaggtattccccttaaagagcaagaactccttaatgccatctactcgggttcttttgtcaatgcagccaaacgtgtattcagtaactcaaccaatgcagaagtgcagaagtggagtcattatgtaaaaggggatgtaaagcggcaagattatctggccgaagccctaaagtgggtatgtgaaagtaagcatatgacaatcgatgcctatatgagcatgcaccgtcacgatacatctacgggagaattagaaagctattttcgttcagtgattgactgggtatcagctacctttactatggtagagcgtgatatgtgcggtttggaatggggacggctgtatgagaagtaccataccaccccttatagcatagaccatattactaaacgagtaaaagacctgcaagcagacgaaagtgtgcggtgcaagaaaaacatctatgaatatattttaggtggcgaggaagaaaagcaactattggatatcagaatattcgaagaatctaccaaaaaagctgcctataatcgccaaaccgaagaagccaagaagaaaggtgtctcgaactgtcccttatgtgccctgggcaataatgcaaacaaaacccgcatctatcaactaaaggaaatggatgccgaccatgtaacagcttggagtaagggaggaactacaacgctggataattgcgaaatgctatgcaaaacacataatcgttcaaaaggaaacaaataaatgctggaaaataactattttgagagggtgaatatgtctaaccctctcaaaatagtatatatgcagaaaaccttttatgaagtatctcaagattggagcaaagcaaagcgtcctatcgtgaagtattccaccatgtgtgcatatctgttaatccttcaaaaacatttagatccttattttggctcaatgaaagatataacagaagatgtggttcagcagtttgttatgaataaattatccagtggccattccaagaagtctgtgagagatatggttgctgttctgaaatctgtagtaaaatatggtcggaagcaaaaaatgtttacttacgatgattgggacatcaaatatcccactgacacaagcgatcaccgcctgcctacgttatcattcaaaaatcagcaagtgttagtaaggcatatcgttcaagcacccaacactaagaatatcggtatactattggctctttatacagggatgagaataggagaagtctgcgctcttgaatggcaagatattgatttcaaccaaaaaacaattaccataagaaagactatagggagagtatatgattgtgaaacaaaatcaactcagaaaattatatctaccccaaaaaccaagaactcttatcgagaaatcccgatatcaaacatgctactgaaatgtttaaaggttatccgcaaagaagctaaaggaactttcgttgtcggtacctcatcaacagcacaagagcctcgtatttatcgtgactattttaatcgactattgaaaaaacttgaaatacccaaaatggtatttcacggacttcgtcacacattcgccacccgatgtattgagagtcagtgcgattataaaacagtaagcgctatacttggacactctaatattgcaacgactctaaatctgtatgtacatcccaatctaaatcagaaaaagaaatgtattgatagaatgagtaaattcttagatattttagagtaagatcagaagaaggattggaagtttacatatccatacgtcattttgtgaggaatgtaaacttccaacagcgaaaacatccaatctatcaccacttcatcacacgtcctctttccacatcctcctcattctttctctgcccaacttcccattctcgattggcgctttggctacccacatcagtgttcctcaaagcagctgaaagcctttgcagtttgggtgctttaggaactggtgcaattctgacaggagctttggctttcgtttgtagcttgggagtctgttgcttccgtggctgccgtttcactcgttccagatcaaagccttcgggattgaggttgatgagtatgtggcactggaagtcgatggcatagtaggtgtcgccatcgtgtaacaccttgaagtcttcctcacgaagggctgctcggatagagtgaatgctttcatcattgaaaatctcacggaatcgcttcacggcatcggcatgcgactccggacgttcagacgagagggaaacaaggtctttccgatcgaccttataaatcttgcagagaaagtcccgttcggcttcggtggtgggatgaaactgctcgatgtagtggatgcggttgttgcggtcgatggctgcggccatgaatgggggcaacttccggctctttccattgtagtagatgacgcctttcttgatgtacgcccggtgcctcctaagtttccggaagatttcatcctgagttatcttcgggtcaatcgtcaagaggtcatcgatgaagcgttcgatgcgctcgaagcgttgagcgggtgtggcgaagtccagcaactcttcggttgaaagaatccgggcaccgtgaatgactcgtttgtgggcatggtccaccagcatgtagccgtagggagcatctttccgcccaaagaacacgaggtcgatgtccagcttggctttgagtgtttgcttcaacttttcctggttggcgctcacatcccgataagtcttcaagatttcccgcagctgccggttgcgtgcgctgtccgattgggactgtttgtagaactgctccaagacggatagcggaatctcctcttgaatccttcctccttttttgacatagaccttctcctccttcttataaacttcatagcccattgaaaccagtatggccttgaactgggcaaaagaggagaagtgatattgcttggcagtttcgatgtccttttgcgttgtcttctcccggttgatgcccatgagtttgtccaccaccacttgcgaacgtcggcgctcatggtgatggttaatcttgtgcccgtccggtgccacacgggaggtgacgacatgcaggtgcaggttgtcggtatcgtggtgtgcatagatgagacagggttgtccgggttcggcatagcccatttcctgtagatattggtgtgtgaagtccaacagttgggcttgggtcatttcctgtcccttgcaggagatggctacatggaactgcgcctttctgacccgatcgttacgggaactgtatcgttgcaggaatctcaccttctcgttgggcgtggccggttggattactccgaccgctccgaagttacgcatctccagcaggtgcgctgtcccttttgacactttgcgctcgttgtaaccgacggcatggaagttttcgcttccgggtaatatggttgctatcatcttgattctaagtttgaaagattgtgcgttcaaagaacggatgaacctcagtgcttcggttcaagtcgcttcggttcatccgttcgaaagattacggtttcgtagccattcgtgccaatacatcaaggcgcttttgtatctggttgatggcctctttggttcccagaatcgcgagtaccaagacctccagtacgtagctgggcgatagcaaatggaccgcagccagttcattggcccgtttcatcgcttgattcagatttccgccagcccaggacagctcgttgtgtaccttttgatagaactcaccgatttgaggaatcagttcatgctgcaatttgaggtcgggatgggaatattccttcagtgccgaccgcacatagtggctcatactggtgtaggaagccgcttgcttcaggtggtatgccatctcttcttcggtcatgcgcaccttgatactatgggtttttagtttcttcatacaatgattcgttatacatgggtatttcaggaggatgctaccttatacaaggtgaccagggtggcaaggtttcccgcacctcttttcgcccggcgaaacagcgatgccatcgctccgcagcgcagcagtcggcaagttacttttgtgcaccaaaagtacaacttgcttcacaaatcctgtaaagctcagaatatgctgtggacggggggcgctggcttcgtcacctttcaactttttgcgtgcaccttgcttcgtaggatgcttgtttcgaagtacttcggtcaggtgaactatcgtacttctgtcagctgttacaccctttccaaggttggtggctcctttgtttgtagcgtccaagatacttgcagtgaaaagaaaaaagaatttgggaatccatgaatcgtcttctcacgaattggagtgagggaatagttagtatccttgttaccatcaattcttgtttcttgctatctccgtacgttgcaccaagggttacccaacaagagggaaaagaagttttgttccattgtttcaccgccactcagaacatgatgtagagtatagatgcattcaacttcatgctacattttttcttttcaatgcaattcttttccctcctagtctctgaacaactttcaatggaatgaagcccagaaactatattcactagaaggtgttttcaatttatgttgatgaaacgttgaattgttgaacatcattatgaaagcgtaagtattcatattggacctcaatgactattttgttgagcatctgttgagttgtaaaaatgctgagtatcttacatttatctattctttttcaacaactcaacaattcaacagtaaactaaagccttaatgatttaagcagttcctttgtgaccgtatagaaacgtccgaccctagtttcgggtaaaaactgattcggtattccttgtacacttttgtatgtttgataagtaagtccgttaggagcaggcaacagatgccattgttgtttcagtaccttacgcacctgccacgcttctacttttgtaccattgtttctcataagcgataccaaatcctgaggtgtaaaagagaactgttctacatgtagtgtttccattatatcccgaatcaattccaccatatccacctcggcatgttctcgattacattgaacaatagcatccaatgcttttgttcgaataaggtcgaagttgaaccacatacgtccctcctttatcgtagaaagtttccgttgttgcaagaagtatagaaaagcaggtatttgcaacgtcagtttctgtaaaaaatcaggctcatcactttttagcggatgtatcttacgtacccaataacgattctcctcagcgtctatgactacaggacatagttcattgttggaacatagcacgaacttagcaaagaagttgacctcttgtctgtcctttccctttgcttctatcttataggtttgtgccgtacttaaattcttcaatcgttcagcatcttcgcgacggtccaataacacttcatccacaacaataagcaatttaccaccccaatcagcattaaactggctgcggaactcttcgttagtgttgaacgttacattatcctgaaatatatgcttcaaaaaattaagaaacgtggttttaccagtgttacgttccgaagataccaacaacagaatcggcagtttctgcgtgggttgcgtatatagtaattgcatatagtccagtccaagctgatattgctctccaaacacatgttgaagtatgctttctatatctggaaaatcaccttctacaggctcgtgatcaataggctcatagaggttataaaaaccatctatttctttttggtaatgagtatggctcggcaccgtacaaaatccattgtacttatccataggaggtatatgccctttgccataatcctgacgaagagcagaaaggctccatggaattctgcgaatagcttttgtgccatcagccaaaggttgctctactaccttatagatagtagtggctacgcggatatatttttcgtccatgtgcattctattttaattagactataaagacttcgtagttgtggaaagtgctgctgtagatttcaccaatgacgtgatttccttttttgaatacaggttgcgtccacctaatttatgcacaagcaccgtaccctctttttgcatacgccaaagggttgtataagtaatatgcagtttttcgcacacttgatcacgagtatagtactcgtcattctcttccggtgacaaatcagactggggcattttgccaatcaattcttccaccaactcagcaacaacctgcttcaggtcgtccttctgtaacattaagaaattaccttgcataggatagtatttaaaagttatgctgcgaaaatacgatggaataaaacgaaaggacctcggcataaaatcaactgatttctgccgaggtctttttaacttaatgatgtgttcacttaacaactctatagtgttccatgccgctatacttctttaataaacatcagaagatagtactatacgaaaatgcaagcctaattgctgcgccttatttttccctttctgtattacactgtcagtcaagctggtgtttcccttacaaatattcccgtctaaaatcgtataataaagggcttctgcataatcaaaacctgctttaaatcctaatgatggaaacctctccaaaatggccgcatgaaatgttctgtaattgaatgttccgttcaacagcctgcaattcgtcaatgctgcatacaaacacgcaagaatggtgtttttctcaccatcctcttctttccattcagtcagtatggaggtaatttccgtcattagtttatgcacatcatccggattaagcatttcttccaacaatacataaacctgcttacgtccacgtctgccgtttattttctgtaaaatggattgcacttttcctttcgctgcacccttactcatcgattcccattttttcttgctatatacaaatggcaacttattaaagctggtataaaccaacgattctataatcgattcagccaatatacgtttccatctggaagaatccgccttcaacattgatgcagaaacccagtcagctaatttgatgaaaccatcgtcaaaaatcatccagtaataagcactgaacagataaggattattccgtaacagtttctgatgagggatagctttgtcaacagaagagccaaataaacagtcaagttgctcgtacatcgttgtatgacattcggacaactgagcaaactgatgctcttcagttcctggacaatgactgcgaaaaagagaaattatctctttcagccctttaaatgacagcatatccactaaatgaaagatacctttgtaagcaaagtccatattcccttcataactatctctaaagctgtttaggaagtcagaatattctttcgaatgttcatagtgccaacgacgcaaccctaataaactcaattctgcgtgaactatctgttgactttcttgagcgtgaatttgcaagtaactttgaatacaatctctcgtcaaacgtccgtcgtctgattgcttaaaacgttctattgcttgttgaaacgtttcatacccttgatctaaaataagaaaacaataccagcaacaggcatcttgatcatcttccttcaatgctttttcgatacacaaaactacttcttcctcacagacctcttccaaagcctccattttatttagacagttttgaaaatactcagtctgcgcttcatccaattgctttatcatatcccacgaaggagactccaaaaccgattgaatccttatcttgaattgaagataaacttcttgattggtttgaagccatctcttcaaagaataacggacagcatatgcactaaggaacgatttcattcttaccatgcttttgaggttaaatagcccacctaatcttttaaacatgccaacggaataaccttcactccatcgggacgagtataggccatcgttccacctgtcatgacgataagtaaatcaggctcacgaataggaacctgcttttccgttttgttatgctcttgtataagtcgtttgagctcaagcaaatgcttggcaccatcatctatttcgcaactaccaagtttacactcaattagagcgtaacgcccatcttccagatgcaacactatatccgcttccaaatcgtatcggtcatggtaataagatacatggctattcaaatcaatggtgtatgcttttaagtcgcgaatacacatctgttcaaagataaatccaaatgttctgagctgcatacttaatgcctcaggagatagtcccaaaagagcaatcggtatggaagggtcacagaagcatcgttttacactacttctgatagcagttttgcttctgattgcaggacaccatgcacttatattctgaataacaaacaatttttccaacgcggcaacatagtcatcaaatgtgtccacgtggcagctaacttcgccagacgaagtcacatcgtctaaaagagacttcttcttgaccaatgtcgaaacattccttgcgtatgcccgaagtatcatactagtcagcttggcatctctttttctgccatcaatccccgaaatatcatcagaacaaatagtttggacatagttctttgctacaagtaattgagcctttggggtacgagccaacaaagaagcaggccatccacctcgggatgcagcaaagattaggtcttcaatggtcattttagacatcttcccatcaatatcataatcggaattattgaaaagttctttcaacgaaacctctcctgtagattcttgtgactcccacaaactcataggtaacatacgcagtctggcaatacgaccaactccagaatgatgtatttgagacttgtcaacagcattggagcctgtgagtataaattgtccggggatttgacggtcatcgacagttgttcgcactgcatcccacagcatgggagcatcttgccattcatctataagacgtggcgtgtctccttgtaacagaatggacggcttagttttagcggtaactaaatactcagcacgcatacttggatcttgcattttcaaaatgctatttgcaagttgagatgcggtggtagttttaccacaccatttgggtccttctatcaatactgccccaaatgcatctagtaagtcttgcaatagggcatcggctgttcttttgtaataactcatataatgtactttttttcaaatacaaagataggaaatttctttaaacggtttaatgtattcgtgttttttgtggtgttttaatccacttttttgcggcatgttgttcggtatttttgcggtcatttattccttgtttttgtggcatttcacttggtacttgcagtaattagattattcttccgatagcttagacataagctccatcctttcctcctcgctcaaaccttttagcacctccagcaatgcttttttatctaccacagaagttcttcctttcagtttctcattgagcagataatggttatactccagcattttctcaagaggataggctccaatataattagacgttatatccccattgctgctatgccccatgctgtcacttatgtatttataaggtacaactccagaattattaagattggtggcaaaactatgccttgcccaagtcggagatggcatttgttccaggcctagcagtttggcaactttagccatgtgctcacgtatatagcggttatacctttggataacccatatttcttgttcgggagataacaaatcactcataataggaaatactcttcgccctagcttgggggtattgccataacgattcaaaatctcttggatttcggatgtaataggaaagataacttcactggcactttcattcctgtctcgggtcttgtgtcgaagaaaacgtaactgcttgccatgagtagcataatacaactcatcatacgtcaagcgaagcgtatcagccaagttctgaccatcgcccagatacatgaagaggaacagacctaaatcacgaaatatagcatgcttttctcttttaagaaatagttctttcccctccgaatctattgcttcatcagctttccaaaagtcatagagcctgcgcatggtagatacatccaaaaattcatgcttacgactttgggctttattgtaacccgtatccttgaacatctctttagtatcgcccttcatcaagccctgtgtaatacacctgttgataatcgttctaagactacggagcgcgattgcaatagttgtagtactcaattcattcttcttcatgatctttacccactttaaaatgagttcgcggttaatatcagaaaaagacaggtcactgcccatatcctttacgaaacgattacgtacatccctgctgcaacgtgccgacccagctttcccctcgttagtcttagattggatataggcatcccaaatggtaatgagagtgctatcgtcctctttctttccttggaatctatcttgtaatttacggagtgaaaaattattttccagaataagttggttagcaataagttcaaccctatccataaggcttttcatatcattccgctcagccagctggatacgcctaccgctcttttcataatcgcagagagtcacccactcatccatggtataacttttacccaatcttaaaaaggccttttgtccagcataacatactcgcacggaaactggaagtggttgcgagtaatcacctgccttgcgaatatcaagcgttagcgaaccatgtacaataccattagatgcgatgaatttggcaaggcatttttcacctcttgaactagactttttccccactaatgtcgttttggtgaccttatgtttaattttattatccataacacactaatattcaagttaaacaagacctgttttggtgaccttcaggtgaccttttaggcttaaaactgctgcaaatatagggaattttatgcaattatcaaaatacttttattgctgataatcagcatatttaaaacacatgtaatactataaaatattgcctaaacagactcataatctggaggtccctggttcaagcccaggctggtccacaaactaaaaggctgattcctaacggaatacagccttttttgtttgcagaccctccagatatgatagtatgcccaattctataaagctactacaattctaagaaatacttctatatataacctcattcgcaagaatgttgcagcagtttataataaacaaaaccttatataatcttctatttcttgagcagctacagcataaatcggtgcaagttgctcaaaatgggaatctcttgtaaaacgagagccgttgatggtcatagctaattggctcatattcctttctccgcaaatcttaatgtaacataataataccttcttgccaatagcagtttattggctgcatcgcagttagttacaactccacatgtatgaatttgtactttttatggacaattacagatttcacatttcttatacaatccatacatttgcacatcctaattttttaattttatttttatgagaccaaaagttatcttaaatcttttattcttccttttctgctgtacagcagtacaggcacagacaggaagacagattacaggtaaagtgattgatgccatgggagagttgcccggggtaagtgttgtaattaaaggaacaaccaatgggacaaccacagatttaaacggagagtttaaattggacaatgtaaaaaatggtgatgttttacaattctcatttatcggctacaaaacggaaaatgtcaaagtaggcaatcaaagtaaatttgatattacaatgacagaaaatacccaaaccttggaagaagtgaccgttgttgctgtaggatatggtgatgtcagaagacgtgacctgaccggttctatcggttccgccaatatgggcgatttgaccaagactcctgtcagcaatattaccgaaagcctcggaggacgtattgccggcgtacaggtttcatccggtgacggtggaccgggagataactttaatatagtaatccgcggtgccggttcattgaccggaagtacagctccgctttacgttatcgacggattcccttccgaaagttccggcttaggatcaataaatcctaatgatattgaatccatagacatcttgaaagatgcttccgccacagctatctatggagcacgcggtgccaacggtgtagttatcgtaaccaccaaaaaaggcggagctggaaagcctaccattacatacaacggtagcgtaaaagtaggtcttgtaaaaaacacaccggaagtgatgaatgcctatgactttgtcatgctgcaacaagaaatcatgggcagcggagaagaattccagaaaaactatataaccgaactttatcctacactggatgcctatcacaatgctaaatcttacgattggcaagactatatctaccgtaccgctctcagccataaccatcatatatctatgaccggttcgcaaggcgatttgaaatacaccacatctttgtcttacgatgacacacagggagttatcatcaactccggcgtaaaacgctatcaaggacgtgtgaacctgagccagaaagtaaacaacaaactgaagattgactttacagggaactatgccagcactgttcaggacggtcctaccgtatcgagcgccacaagttccatgtctaccgcctacatgtacagtgtatggtctttccgtccggtatcccctactggaagcgatcttctcaatcagatgtacgatgagggtgtcaatatgagtgaggactaccgctttaaccccgtgaagtctgctcaaaacgaataccgtcataagacaaccaataatctccagtttaatgtaggtgccgaatatgagataattaagaaactcaaactgaaagttacagccggatatacatcaaccgactacaaaaacgaagaattcaacggttctcagacacgcaccggtaacagccacccttccaacactgaaagtaagggaataaacgcttatctataccaaagtgaagcaagaagttacctgaacgaaaatacactcagctaccaactgaacaagaactctcataatttcaatgcgatgctcggtatgtctgttcagaaaaataccagctatatacattctatacggacggaaaaaatcagcaatgaatctttcggcatggcaggactcgataagggaagcacaccggccgtaaattcttccaaaggcgaaaacaaactgatgtcttatttcggacgtatcaattataactacgactcccgttactatataacagctaccatgcgtgccgacggttcttccaaatttgcccgcggcaaccgttgggggtacttcccttccggctctttggcatgggcttttgcgcgtgaatctttcattgccgaaaatgccagctggctgtcaaacggtaagctgcgtttcagctatggccagaccggtaacaaccgcataggcaactatgactatatggcacacctcatcactgatgacgatctttacaaatatccgtggaacggtcagtttgtaccgggttatgtattgagcagcatgcagaatgaaaagctgaaatgggaaacaaccgaacaattggacctcggtctggacctcggcttcctcgacggacgaattaacctgaatatggactattacatcaaaaccaccaaggatttgttgcttgatgccgatatatctgccagctcaggcttctcttctgctaccttaaatgttggaaaattgcgtaacagcggtttggaaatcaccttggaaaccaccaatatcaaaactaaagatttcagttggaattccagcttcaacatcgctttcaacaagaatgaaatcatagccttgaactcaggacaaccttatatgaccagctatatcagttgggataacaaatataaaaccactccggcatatatcagcaaagtaggtgaatctgccggtaaaatgtacggcttcatctatgacggaacttacaaatatgaggacttcaacaagacaatagatgaaaacggcaaagaggtatataccttaaaagaaggcatcccgtattacgtagccggtactcaaccgggagaccccaaataccgtgacctgacaggtgaaggtgaaatcaacgacaaggacaagaccactatcggtaacggtcagcccaaacacataggtggttttaccaataatctggtttggaaaaacttcgacttgaacatcttcttccaatggagctatggcaatgatatcctcaatgccaaccgcatggtgttcgaaaacccttccgccaaacaaaataccaatatgtttgccgcctatgctaaccgctggactccggaaaaccccaccagcaacataccgagagcccgggcgcaaggttccaatgaatacagttcactctatgtggaagacggctctttcctgaaactcaagaacatctcattgggatataattttgaggcaaaaacactgaagcccttgcatataagcagcgcacgtgtttacctttctgccgaaaacattgccactatcagcggttattccggaagcgacccggaagtttctacccgtaattctccattgacaccgggctttgactggtctccataccctcgcgccttcagtatgtcattgggattaaacgtaacattctaaccaaatattaaaaatgagactgatatgaaaacagtatataaattattccatgcaacagttttaacattatgctctgccataatgctgagctcctgcgacagttttttggatacaaagccttatgatttcaccgctccggaaactttttattccaatgaaagtgaatgcacggctgctttggccggagtctattatactttggcctacgagaaagtatacggaaacaattactcatgcatgatatccaacgtagacgacctgagttactaccagcgccaaagcggacaattggcgagtcaagtctatggcaacgaccataatccgggaaaccaacatgtatggggtacatgggagactctttacaaaggaatcaacaatgccaacgtttttcttgagaatgttgacaaagccgacatggatgaaagtgtgaaaacacgaatgaaaggtgaagctaaatttctccgtgcatattttcacttcctgttagtacaaggctggtacgaagtccccatccgcaagacctcattcaaagacgtgaataattcatccatagaagcaactccccataccgatgcgttggattggattatcggagaaatggaagaatgcgtaaacttggttgatgaccagacctacgataagtctccctcttatatcaaaaagaatacaataatgggtatccttgcccgcgtatacttgtggcgtgccggatatcccgccaacggcggacagccttactatgccaaagctgcatactgggccaatgaagtgaaaaagtcgaacaagcataaaatgaatccggatgtcgaggctatctggaggaacatggcttccgacaaatatgataccgaatacaatgaaagtatctgggaagccgaatttatcggtaaccgtactgccgacggcataggaaactatacagacggacgtataggaaatgttataggtaatcttcaaaagtgcaccaaatctaccggtaacggatatggttacggcttctatgcagccactttgatactgtgggatttgtttgacaaaaacgataaacgccgagacctttccatcgctccttattggtatgatgtaaacgacaacaagaaaacatggacaaacaaacaaattgtccaacgttcatgtggaaagttccgtcgagaatgggaaagctcttctatgaaggacaagagctatactccggaaaactatcctattttacgttatggtgatgtccttttaatgctggctgaagcagaaaatgaagcccatcaaggacctacggatttagcatacgaatgcattaatgagatacgccaacgtgcaggcatatccaaattggagggtttgtcctatacagacttccaacaagccgtccgtgacgaacgtgcccgtgagctctgttttgagtctctgcgaaaatatgatctggtacgctggggtatttatgtagaagccgtacacgacaaattaggagctgcgactcaagataaacgctgggctacaggaaaccagtttatcggtgcacgcgattatgcagcacgtacacaagaaaaacaccagttcctccccattccgacaaaagaactggatgtaaacggcaaattggaacagaataaatattggcaataacctaaataaaagaactacaattcttctaaccttcaactttttttattaacttaaccgaaagaggttgtttcatggcatgaagcagtctgccgttccgtccggaaagagatggcggcagaatgcctctacatcggagacaacctctttttttgcatacctgctaaaatttcgcaatatgtaccgattctatttgttatattgtctgtttttatgctttggcaacatactctttgcacagacaaccggatttgaaaaaggagtgccacaatccttctgcacagtacaaccaaacgaactctcttcctcagaagagttctacaaagaagggaaaagaagccttgcatggcaattctctccccgttccgtgctcaccgtcaaactagatactcccctacatctggactccatatcaaaagaaaagcgcgggattacactatggatttacaacgaacaagccagaaaagattcgctgcgctttgaattcttctctccaacgggtcatgtatcttataggttcggtttccggctaaacgctcagggttggcgtgcctgttggataggctttgcccacatgaaaggagataagcaagagaatacaatcgccggttaccgtattgttgctccggacaacaacggacgcgtattcttcgaccgtctcgttttccccgtaaaagaaatgaatcaacgcactactcccgacatgcagatgccctacaataattcacttacatttagagacttatggcattggtgtcgtgtatggcaatgggaacagttggaatatgacctgcctcttcctgctacgctgactccgacagagaaacaggaattacaaaccatagaagaacggctgacaaaagtcctgacagcggataaagtttcacaaggcaaaatcgacaaagcctatgctacattccaaaaagcacagatacaacgctccggaaacggctttacaggagctcctcttgtagttcccgatgacaagttgaaccgcaaaaagggagaaatatccctcaacgatctggaaacaatgctctccggatttgcctatgatgcctattacaatcaatccaaagatgcagaacacaaatattttttagtctgggactatgccatgaaccaaggatttgctttcggaagcggcatgggaaccaaccaccattacggctatcagataagaaaaatatacaccacagcctggctgatgcgcgacaaaatacggcaagctcccacatgcgataatatcctttcaacactatcgttctgggcagccttacaggaaacccgtaaggcatgcggcaaaaaccgcgacgagttactggatacatggcatacattgctgatgcctaaaattgtttcagccatgatgacaaaggatgagagagaaagggttcgcgcactgaaaggactttcacgttgggtatccacatcgttgagatatactcccggtacgattggaggtattaaggtagacggtaccacttttcaccatggcggcttttatccggcctataccacgggagcacttgctatgctgggacaattcaccaatctgactaacaagacttcttatcaattgaccttatctgccagaaaggtactgaaatccgctcttatcgccatgcgcaactattgcaacaaatacgaatggggcgtaggtatcagtggcagacatcctttcggcggttccatgaaagatgacgacatagacgcttttgcctaccttgccctatccggagacttctcggataaaggagaaccgtttgatcatcaactggccgcagactatttgcgcctttgcaaacgtaatacccctgaagccgcttacttcaaacaacaagggatacttccggcaacagcgccacaaggcttttttgtatacaattacggttctgccggcattttccgccgcaataactggatggttacgctcaaaggatataacacagatgtatggggagcggaaatttacacaaaagacaaccggtacggtcggtatcaaagttacggttcggtacaaataatgggggctccttcccgcaaagccagcggttacaatgaaaatggctgggattggaaccgactgcccggcaccaccaccatacacctgcccttcgaactgttgaacagtcctctgcctggtactaccatggcacgctccaaggaaaaattcgccggtgcaagttctctgaaaaaccaaaacggaatgtttgccatgaaattaatggaacgagaccttaaaaactttaccggcgatttcgtagcacgaaagtcggtattttgtttcgataaccgcttaatctgccttggcacagacatcaaaaacagcaacagcgactatcctacggaaacaacacttttccaacacgtcttccgaccgggaaaagatttcatcaggattaccggagaaaaagaacagcaaatagggctgcaacaggaactacctgcctcggatacacaaccggtctgccttgaagacggctgcggtaacctgtattttgtgaaagacggaaaggtaaaggtacaaatcacagaacaggaatcgcgccacgaaaagttacgcacccccactaccggaacatttgcgtcggcatggatagctcacggaacagctcccaaagatggaagctacgaatacatggtatggatacagccttctggaaaagaactgaagacccatgtgccggcagccacctacaaagtgatacaacgcgaccgcaagatgcatgccgtaaacgatattctgacaggcaccatggcatacgctgtctttgaagataccaaaccggctgccgataatgttttctctttcttgcccgcagaaacaatggtgatgtatcaaaaagagaataatgccttggtaatgagtgtgtgtactcccgacctcaacattgcggaaaagacattcacaaccaaagaacccagccgtatcataataaaagagttggaactgaaaggtaaatggcatgtgtctgcttacgacaaaagagtgaaaacgacataccggaccggcacaacccaactgagtgtggaatgccagcatgggcaacctgtagagtttaccctggttcaataaagcctcagcagacaaccggtctacctcctgccgattgtctgctggcaaaactcctcaatcatatcacaattatccgtatctttgcaccgttactcaaacaatgcccatgacactgactgaagaaacactccgatttatccgggagcatcgcaaagacaacgtacgcaaccttgctttacaagcacacaagtatccgacagtagacgtacctgccgctatcatccaaattgtgggacgtcaaatagcagaagaaaaaatacccgcttgggcagcacgggaaggtattctttacccggcacatctttccatggaacaatgctcctcggaagtaacggcaaactataaggtcaaaatagtttcagacacggaatacggcagccgcaaaacctttaccgacctcaccggcggttttggcatcgactgtgccttcctatctgcctgcttccaacagtccgcctatgtggagcggcaggaaacactctgtacaatagcagctcataacttttcgcttttaaatttaaaacaggtcatggtctgccatgaagacagcatccgttatctgcaaatgatggaacccgtagactggatattcatagaccccgcccggcgtgatggacacggaggcaaaacaatagctatcagcgaatgtgagcctgatgtttccgctttggaaaatttactgcttgagaaagcatcacacgttctggttaagttatctcccatgctggaccttacccttgcactgcatgacttgaaacatgtacaagccgcccacgtcgtttccgtcaacaacgaatgcaaggaacttctccttgtattagagcgcgggaaggaattagtacctgaagaaatccctatccactgcatcaacctcactgcatcgcagaaggttcaaaagctcctgttcacccgccaacaggagaaagaacatacatgcccgtatactcccacattgaaaacatacttgtacgaacccaatgcatccatcctaaaagccggagccttccgcagcgtttcatctatatataatgtagagaaactgcaccccaacagtcatctttatacttccgacgagtatataccggactttcccggacgcaagttccgcattaccgatagcagcagtctcaacaagaaagagcttaaaaagctgataggaacggaaaagaaggccaacctcacagtacgtaattttcctgccagcgtagccgagttgcgaaaacgcctgaagctggcggaaggtggagacatgtacctgtttgcaacgactcttgccgatgagaaaaagctgttgattgcctgtaaacagccttaatatacagttaaagcaaataaaagtaaagtacattccaatcttataatctgtcattcagtacatacaagataaattatatcgtcccctgatgcatcatttgcaattggtttgtaatattatcgttaccgtttcttcaaaattccgtaagacagacgtaatcccatacctatacttttgccgcagattattaacagataataacaggtatgaaacaaattgtaagagcattcttattccttctactattcgcagcggccagcaacacgacaatggccgacgaaaaagcaaatatcgttaaacaaggtacggtacgcggccgtattatcgacgtaaccaagcaaactctcccgggtgcttcaatctacatcgagaaactacacacaggcgtgacgagcgacgtcaacggcttctacactttccccaacctcgacccgggaacctatacagtgaaggtgagctatgtaggctactcacccgtagaactgaaaattacaattcccgccggacgcactttagagaaagatgtggtactgaacgaaggagtcgaacttcaggaagtagttgtaggcggcgcatttcagggacagcgccgcgccatcaacgcccaaaagagcaacttgggaattaccaatgtagtatctgccgaccaggtaggcaaattccccgactccaacatcggcgatgccttaaagcgtatctccggtatcaacgtgcagtacgaccagggagaagcccgcttcggacaagtacgcggaacaagcgccgacctgagctccgtaactgtcaacggcaaccgtgtaccctctgccgaaggtgatacccgtaacgtacagctcgacctgattccggccgacatgattcagactatcgaagtaaacaaggtagtaaccccggatatggacgccgatgccattggcggctctatcaatctggtaacgaagaactcaccctataagcgcagcattgctgccaccgcaggaacaggctacaactggattagcgaaaaagcccagctgaacctgggatttacctacggcgaccgtttcttcaataataaattagggctgatggtatctgcctcctatcaaaatgccccctccggttcttacgacaccgagtttacctgggagcaggataaagacggcaaagcatacgtcaacgactaccaaatgcgccagtattacgtaacccgcgaacgtcaaagctactccgccgctttggactgggacatcagtaccaaccacaaactcactttcaaaggtatcttcaataaccgcaacgactgggaaaaccgttaccgcactaacctgaaagaccttgagccggacggcagcgccaccgtacgcatacaaaccaaagccggaacgcccgacaaccgtaatgcccgtctggaacgccagcgcacgatggattttgcacttggcggtgaacatctcttcggacttctttccatggactggcatgcaagttatgccaaagccagcgaagagcgtcccaacgagcgctacatcgacttccaactcaagaaacagaaattcgatatagacctgagcaacgaacgtcagcctttcgcatctcccaaagacggttctacaatgaccttgaatgacgaattcagcctgaaagaactgaccgagcaacaggaagacatcaaagagcaggacttgaaattctccgccaacttcaaactcccgttcaagaatggcaacaaactgaaattcggcgcaaaggtagttcgtaaaaccaaagataaagctgtggacttctacgaatattctccgctggacgaagatgcttttatggaaaacagccttaaaaatactgttgaccaatccaacaagcactttatgcccaacagcaaataccagacaggaatctatgccagcaaggaatacaccggagcattagaccttaacaaccctgcattgttcgagaaagaacaagtacaggaagaactggcaggtaactttgaggcacgcgaaacggtcagctccggctatgtccgctttgactcaaaaatcacagaccgcatagagctgatgtccggcttgcgtatcgagaacaccaatctggcttataccggacgtacatacgatgcagacgaagacatcaccggcaagaccgaacgtcagcgcaacagctacattaatttcctgccttcgctgctggtaaagtggaatgtaaacgatgacttcaaggtacgcggttcatttacccaaacactgtcacgtcccaagtactcggctcttgtaccgagcgtaaacatcaagcgctccgataatgaaatcaccatcggtaatccggaattaaaaccgaccacatcctacaacttcgacttgagcgccgactattatttccgcagcatcggtctggtcagtgccggtatcttctacaagaaaatcgatgatttcatcgtagaccaagtcagcaccaactacgaatatcagggcaatgtatatactcgattcacacagcccaagaatgcgggcaacgccaacctgctcggagtagaactctcttaccaacgcgacttcggtttcatcgcccctgccttgaagtgcatcggcttttacggaacttacacctatacgcactcccgcgtagaagacttcaacttcgaagggcgcgaaaacgaagaaggcctcagtatgccgggttcaccggcacacaccgccaatgcttcgctctatttcgagaaagccggactgaacatccgcgtaagctataatttcgcttccgactttatcgatgaaatgggtgaaagcactttctacgaccgttactacgacaaagtgaactacatggacgccaatgcaagctatacgttcggaaagaaaataaagactacattctatgccgaagccaataacctgctgaaccagcctctccgctactatcagggaacgaaagaccgtaccatgcaagccgaatactacggtgtaaaggtgaatgccggagtgaagattaatttttaaacacatcaccacagagagacagagcattttcttttgtaacacactaaatgaaaaaacaatgcaactgtataccctctgcagtgaataaataacatccaaacaatgaagaaaatattctttttactattcgtcgccctgctgggcaactgggcaagtgcccaaattaccgattattccgtattcgacaaaaagttcaacttctatgtagccaatgacctgggacgcaacggctattatgaccagaagcccattgccgaactgatgggagtaatggcggaaaacggcacagatccggagtttgtactcgctacgggtgatgtgcaccactttgaaggcgtacgttccgtcaacgacccgttgtggatgactaattacgaactgatttacagccatcccgaactgatgatagactggtttcctttgctgggtaatcatgaataccgcggcaacacgcaagccgtactggattattcgaatatcagccgccgctggacaatgcccgcacgttactataccaaagtttttgaagacaaaggcatgactatccgggtagtttgggtagataccgctccgatgatagacaaataccgtaatgagaaagagacttatcccgatgcttgccaacaagattacaaacaacaactcgcatggattgattctgtcctgaccgccgctaaagaagactgggtaatcgtggccggacaccaccccatttatgccgaaacaccgaaagacggaagcgaacgccgggatatgcagtcgcggctcgaccctatactccgcaggcacaacgtagacatgtatatctgcggacatatccataacttccagcatgtgcgcgtaccgggcagtaatatagattatatcaccaacacctcaggttcgctcagccgcaaagtcaaccctattgaaggtaccgttttttgcagtcccgaaccgggcttttccatagtatctgccgataaaaaaacactggaactgcgcatgattgacaaacaaggcaatgtactgcacactgttacacgcagcaaataacccgttttttaagtcaataggaaaatcctgattatacgaagttgtatcggaaagaaccaaaccatcattccgatacgacttctttcaattatttctttttccgtagcaccatccttcggagccgtacttacatttacgtcacgcgtaaccatataatgtggagatataatttccgccccggtttcggaacaattctccgcatttacaagcgcaaacggacttcctcttggctcgtttaatcagaattttgcattatctttgcgcgcaaaataatatacttcatgaacattctattacttataggaggacttctcctcatcctgttaggtgcaaacggactgacagacggagcagcatccgttgccaaacgcttccgcatacccaatatcgttatcggactgacaatcgttgctttcggaacatcagctccggagttgacggtcagcgtatcttccgccctgaaaggaagcgccgatattgccatcggcaacgtggtgggcagcaatatcttcaacacactgatgattgtgggctgcaccgcactgttcgccccaattgccgtaacccggaacacattacaaaaggaaatacctctgtgcatcctgtcttccattgctttactggtttgtgccaacgacatattcctgaacggagacaaggctaatactctcagtatcacagacggcttgcttttgctctgcttcttcgctatcttcctgagttatacttttgccatcgcctcacacagtcccgaagaaacagccggcagtgaggaaactatcaggcaactgccactttggaagtctgtcctctacattctgggcgggcttggagcacttattgccggcggcagtttctttgttgacggtgcaagcggcattgcacgcagcctgggagtaagcgaatctgttatcggactgacgctggtggcaggcggaacatccctgcccgaacttgccacatccattgtagccgccttgaagaaaaatccggaaatagccattggcaacgtagtaggcagcaatctgttcaacgtgttctttgtactgggatgcagtgcatccatcactccgttacacctgaccggaatcactaatctggacttgtgggtactggcaggttccggaatcctgctttggttcttcgggctgttctttgccaagcgtaccatcacccgcattgagggaagcatcatggtgctttgctacgttgcatatacgacattcctcatttataacctgtaagacacccgtttttaaagattttcatgtatctttgccggctcataacaacatacaactatggcaattacaattaaaaaggtctctacgaaaaaggaattgaagcagtttatccgcttcaactacaaactatacaaaaacaatccgtattcggtacccgatctctacgatgatatgctcaatacctttaacaagaagaaaaatgccgctttcgaattttgcgaagccgattattttcttgcttacaaggatgataaaatcgtaggacgcgtagccgccatcatcaaccataaagccaaccaaacctggaacaagaaagaggtgcgcttcggctggattgactttatcgacgaccccgaagtatcggaggcccttatacataccgttgaagaatggggcaaggaacggggcatgacccatatacaaggcccgttaggcttcaccgatttcgatgcggaaggtatgcttatcgaaggctacgaccagcttagcacaatggcaaccacctataactacccttactacccgcaacacatggaacgcatgggctttgagaaagatgccgactgggtagaatacaagatttatatcccggatgccatacccgacaagcataagcgtatttcggacctaatccaacgtaaatacaatctcaaaatcaagaaatattcatctgccaagaagattgcccgcgactacggacaagccattttcgagctgatgaacgaagcatacagcccgttgtacggttactctgccctgtcacagcgccagattaaccaatacgtaaagatgtatctgcccattctggacctgcgcatggtgacgctggttacagatgccgaagacaaactggtagccgtaggcatctccatgccttccttgtcagaggctttgcaaaaatctcatggccgtttgctgcctttcggttggtatcacctgctgaaagccttgtttatgaaacgccgtgccaagatgctggatctgttactggtagccgtgaaacccgaatatcagaacaagggcgtaaacgccttgctattctccgacctaatccccgtttatcagaaactggggtttgtctttgcggaaagcaaccccgaattggaacaaaacggcaaggtacaggcacaatgggaatatttcaagaccgaacagcataagcgtagaagagcatttaccaaggcaatctaaaaacacgtagttcatcagcatacaaaagacccgcattttgccggcacacatcaccttacctccctttccgtctaagagtttgcaattgtgccggcaaatataatggtcttacacaccatttccccattgataaacatccgttttccccattataaatataccaatctatcaaggataacttgcttttgcctataccttttcttcgttttccaactgcgggatgtccggtttgcatatgcgggatgaagagcccgcaattggcaaccgtggagcccgcagttggaaaacgaggtttttcctatagcctaacaaccttttcaaccatactttttcctattaaatacccagtaaactgaaaaaagtttcagggcatatatttgtttacatagggtgttttatattgattttcttattaactttgcgaaatatcagtgcttacaatacaagatgttttctatggaagataataatatgatgttgccgttggaaggttctgccggttatgaggaaaagacaaccggtacaaataccggcagcagtgaggttgaatacaatgaagataacattcgccatttggacgacatggagcatatccgtgtccgttcgggcatgtacataggccgtcttggcgacggttcgcaaaatgatgacggtatctatgtattgctgaaagaggtaatggacaacagtatcgatgaattcaagatgggtgccggcaaacgaatcgaagtcaacatagaagaaaatctccgcgtaagcgtacgcgactacggacgaggcattccgcaaggaaagctggtagaggcagtcagcaaactgaataccggcggtaaatacgacagcaaggcattcaaaaagagcgttggtctgaacggtgtcggcatcaaggcagtcaatgcactcagcagccgtttcgaggtacgcagttaccgcgacggcaaagtacgcacggctattttcgagaaaggcgtactgcaaagcgacctgacagaggacagtacggaagaaaacggtacgtatatcttctttgaacccgataacaccctctttaccaattactccttccagaaccagtttgtagagacactgctacgcaactatacttatctcaatacggggctgactttcatctacaacgggcaacggattatctcccgccacggtttggaagaccttctgaaagacaacatgaccagcgaggggctttatgacatcgtccacctgaaaggggaagacatcgaaatagcctttacgcataccaaccagtatggagaggaatattattctttcgtaaacggacagcacaccacacagggcggtacgcaccagactgccttaaaggaacatatagcccgcaccatcaaggagttctataacaagaaccaggattatgccgacatccgcaacggactggtagccgccattgccattgatgtggaagaaccgatgttcgaaagtcagaccaagaccaagttaggctctaacaatatgtggcccgaaggccctaccgtaaacaaatatgtaggcgacttcatcaagacggaagtggacaactacctgcacaagaatccgttagtgtccgaagtcatgctgcaaaagatacaggactccgagaaagagcgcaaggctattgccggggttaccaagctggcccgcgaacgggctaaaaaggctaatttgcataaccgcaagttacgcgattgccgcttccacctgagcgacggtaaaggcaaagaccaggaagcggaatcgtgtatcttcattaccgagggtgattccgccagcggctccatcaccaagagccgcgatgtaaacacgcaagcagtattcagcctacgcggtaagcccctcaattcctacggcctgacaaagaaagtagtctatgaaaatgaagagtttaatttacttcaggcggcgctgaacatcgaagacggtatcgaagggcttcgctataacaaagtgattgttgccaccgatgccgatgtggacggcatgcacatccgtctgcttatcatcacattcttcctgcagttcttccccgatctgataaagaaagggcatgtatacatcttgcagactcccttgttccgtgtgcgcaacaagaagaaaacaagctattgctacacagaggacgaacgggtgaaagcaattgaggaattaggtccgaatccggaaatcacccggttcaagggtctgggagagatttcaccggatgaattcagacatttcatcggcaaagacatgcgtctggaacaggtatccttacgcaaaacagacttagtaaaagagttattggagttctacatgggtaaaaacactatggaacggcaaaactttatcatcgataatctggttatagaagaagatttagcatcatgagaagagcaatctttccgggcacattcgacccgttcactatcggccatgcttcggtagtgcgccgtgcgctgactttcattgacgaaatcgtcataggaataggtatcaacgagaataagaatacgcatttccctattgaaaagcgcgaaaagatgatacgggattactaccgggacgagccgcgcatcaaggtacagtcatacgactgtctgaccattgacttcgccaaagaagtggatgccagtctgattatacgcggcatacgcacggtaaaggatttcgagtacgaggaaacgattgccgatataaaccgcaagctgacaggaattgaaaccattctgctctttacggaaccggaactgacctgcgtaagttccactaccgtacgcgaactgctgcaattcggaaaggatataagcatgttccttccggaaggaatggaaatgagtgatgagatgaaatgattggtagttagtgacaagaataatgaagaagatttttgctattatagtatgtatatgtgccgtaacggcgcaggctcagaaaatgggcaatgaagctctccgcaagttgcaaatggcagagtttgccatagccaacctctacgtggactccgtggatgagaacagactggtggaagaggccattatcaagatgctggcgcagcttgatccgcactctacctacaacaatgccgaagaagtaaagaaaatgaacgaacccctgcaaggcaacttcgaaggtatcggcgtacagttccaaatgatagaagatacgctgcttgtagtacagcccgtcagcaacggtccctcggagaaagtaggcattcttgccggcgaccgcatcatagccgttaacgactccgccattgccggagttaaaatgagcacggaagacatcatgagccggttacgcggagagaaaggctcggaagtcaaactgacaatcgtgcgccgcggagtgaatgaacccttattcttcactgtaaaacgggataaaatacctattctcagtctggatgccgcatatatgatacagccccggacaggttatatccgcatcaatcgctttggggcaaccactgccgaagagtttcttaaagcattaaaggagttgcagaaaaaaggaatgaaagacctgatactcgacctgcaaggaaatggcggtggctatctgaacgccgctatcgacctcgccaatgaattcctgcaacaaaaggacctcattgtttatacggaaggcagagccgcacgccgcagtaatttccatgccaaaggaaacggaaagtttaaagacggccgtctcgtcgttctggtggatgaatattccgcatccgccagtgaaatcgtaaccggagccattcaggattgggatagaggtgtagtcgtaggccggcgcactttcggcaaaggattggtgcaacgccctatcgacctgccggacggctctatgatacgcctgaccattgcccgctactatactccttccggccgttgcatacagaagccttatgacaagaccgccaacccggacggcacgcttagcggggaaaataatctggaaaaatacaaccaggaattgatagaccgctttaatcatggcgaattaatgcatgccgacagcatacatttccccgattccctgaagtaccagacaaaaaaattagcgcgcaccgtttatggcggtggcggtatcatgcccgacttcttcgtgccgatagataccacccaatacacagattatcatcggaatatcgttgctaaaggtgtcgttatcaagacaactatgaaatttatagaaagccatcggaaagagttgcaaagcaaatataagaaattcgaaacgttcaacgataagttcgaaatcagcgatgagatattagcaaacatgcagactcttgcggaacaagaaaagattaagttcgacgagaagcaataccggaagtccctgccgctcatcaagacgcaactaaaagcgttgatagcccgcgacctgtgggatatgaatgaatacttccagataatgaatactacggacagcagcgtactacaagccctgaaagttctaaatgaaggagcgtatgaaaaagtggttatgaaaaagtggtaaggttataaccttatcactttccaaacaaccagcggttcagccagcggtttacatagatattcacaatcgcacagcctgcaccgatagccgcacctgccagtacatccgagggataatgtacaccctcattcatacgggacactccgacggaacaagcccacaaggcagaaggggctattacgtaccacttaggatattttatgcacagagaagtggcaagtgcgaaagccgatgcggtatgcccggagggaaatgaaggactgctctcatggctatacggatgtaccctatccggatagcgttcatacggacgttcgcgatcgacaagatatttcataccatacgccaccacaaaagcacccgccacacttgttccgacgtatacggcatccttcaacaagcccttgtcctttttagcccatgccgtcaaagccatagctaccgggacaccaatggccacataaggctccgaacgggaaataaatttattgtaattacggacaaatttattatcccagccattaacccgatgtaaggtattaatatcccaattctgtgcaaagagatttgatacaacaaaggaaataaaaaatacaaaaaaaatggttcttctcataaaacctatctattagtttggcgcaaagatagccgaaatccttagagtattcgcaaaattatcttatctttgttgccacaatttacatattaatacaattcacatatctattcatggcattaaatagttgttgctctcggcaaattgattgtgcgctatgtcctaaaacatcccaaggagtattgatatatagccaatatcctaaaggacagcatttccctgccgaaaagtgtacacaaaattgtataatatttatattgaaaggcgagttgcttgtcaatagcgaggaatatcccggcactactctgcaggcccgccaatgtatcttgcaagctatcggctccaaagtagaattgctggcgctaaccgatgttgaatattttacctaccgattcaccgaacttcctctcctctgtgaagaacgctacaaagacatacttgaaagggcttatgcccctctgacctatactcctttgcccatcattcctaaactggaaagattattcggagatttaacggaatatttcagggagcagccgaacacgtgcagcaggtatcttgacgttaaatgccaggagataatttatatcctgacttgctactacccaatccagcaagtctccactttcttctatccaatcagtacatatacagaaagtttccactatttcgtcatgcagaactacgataaagtgaaaaacgtagaagagtttgcccaccttggcggatataccacaaccactttccgccgattattcaagaacatgtatggcgtacctgtatacgaatggattctggacaaaaaacgcgagggcattttaaacgacctgcaacacaccaagcaacgcatctccacaatcagcacccgatacggattcgattcattatcacactttgcccatttctgcaaagactctttcggcgacaccccgcgcgctctgcgcaaacgtactgccaacggcgaaaacataactattatctgtaaagaacataacaaggaacaagaggacgaatgacaccgctgattcgcccggcaatcttgctacccgctcattacggaataatttctttaattccttgtttaatcaaggtatttcctctatttttgcaggatattagtctgacgagcttttaagaatatattttctaactattaaataatttaaattcaatcatttatgtggttaagtaattcatctgtaggaaggaaagtggtgatgagtgttaccggtatcgcccttatcctgtttctgacatttcacatggcgatgaaccttgttgcattggtttcggccaatggctataacatggtttgtgagttcttgggagcaaactggtacgcgctggtagctaccgtaggtctggctgccctgttcatcatccacatcatctacgctttctggctgacgatgcaaaaccgcaaagcgcgcggtaacgagcgttatgcagtagtagacaagcctaaaaccgtggaatgggcctctcaaaacatgctcgtactgggtatcgtggtaatcgtaggtctcggcctgcacctggttaacttctgggcaaagatgcagctccccgaactgatgcacaacatgggcgcacatgccgacatgctcacgctggcttacgctgccaacggtgtctatcacattcagaacaccttctccaacccggtattcgtagtgctttacctcatttggctgggtgcattgtggttccacctgactcacggtttctggagctccatgcagtctttgggctggaacaacaaagtatggatcaaccgttggaaatgtatctccaacatctactccactatcgttgttgtatgcttcgctctggtagttgtcgtattcttcatcaaatcactgatgtgcagcggcgcttgctgataaattattgtaaatgattaaattgtaatagcattatgactaagatagattctaaaataccggaaggaccggtggctgagaaatggaccaactataaagctcaccaaaaattagtaaaccctgccaacaaacgccgtttggacatcatcgtagtaggaaccggacttgccggcgcttccgctgccgcttctctcggtgaaatgggtttcagagtgttcaacttctgcattcaggactctccgcgccgcgcacactctatcgctgcgcaaggtggtatcaatgctgcaaagaattaccagaacgacggcgactccgtttaccgtctgttctacgatacggtaaaaggtggtgactatcgtgcccgcgaagcaaacgtttaccgtctggccgaggtttccaacaacatcatcgaccagtgtgttgcacaaggtgttccttttgcacgcgaatacggcggcttgctcgacaaccgttcattcggtggtgcacaggtatcacgtacattctacgccaaaggacagacaggacagcaattgctgctgggagcttactccgcactgagccgtcaggtaaacgtgggtacggtgaaactgtacacgcgttatgaaatggaagacgttgtcatcatcgacggacgtgcccgcggtatcatcgccaagaatctcgtaacaggtaagctggaacgttttgctgctcacgctgtggttatcgctaccggcggttacggcaacgcatacttcctctctaccaatgcaatggcttgcaactgttccgctgccatggcctgctaccgtaaaggagcctggtttgccaaccccgcttacgtacagattcacccgacttgtatccccgttcacggcgacaagcagtccaaactgactttgatgtccgaatctttgcgtaacgacggacgtatctgggttccgaagaaactggaagatgccaagaagttgcaggaaggtacactgcaaggaaaagatattcccgaagaagaccgcgactactacctggagcgccgttatccggcattcggtaacctcgttccgcgtgacgttgccagccgtgctgccaaagaacgttgcgacaagggttatggcgtgaacaatacaggtcttgccgtattcctcgacttctccgaagctatcaaccgtttgggcaaagatgtggttgcacagcgttacggcaacctcttcgacatgtacgaagaaatcacagatgtcagcccgtacgaaaacccgatgatgatttatccggctatccactatacaatgggtggtatctgggtagactacgaactgatgacttctattaagggcttgttcgccatcggtgaatgtaacttctcggaccacggcgccaaccgcctcggtgcttccgcattgatgcagggtctggcagacggttacttcgtattgccttatactatccagaactacctggccgaccagattaccgttccccgcttctctaccgacctgcctgagttcgcagcggcagaaaaagccattcaggacaaaatcgactggatgatgaacatcaagggtaagaagtctgtagactctatccataaggaattgggccacgtaatgtgggaatatgtaggtatgggacgtactgcagagggcttgaaagaaggcttgaagagactgaaggaaatccgcaaggaattcgagaaagagctgttcatccctggcgagaaagaaggcatgaacgtcgaactcgacaaggctatccgtctgtacgacttcatcacaatgggcgaactcgtagcatacgatgccttgaaccgtaacgaaagctgcggcggtcacttccgcgaagagtaccagacagaagaaggcgaagccaagcgcgatgacgaaaactacttctacgttgcctgctgggaataccagggttcagacgaaaaagaaccggtattgctgaaagaacctctggtatacgaagcaatcaaggtacagactcgtaactacaagagctaatcgggaagttgaacatttaaagaattaaagaaaatggataaaaatatatcatttacgctcaaggtatggcgccagaagggtccgaaagcaaaaggcgcttttgaaacataccaaatgaaagatattccgggcgatacctcattcctcgaaatgctggatattctgaacgaacagctcatcagtgaaggtaaagaaccggttgtattcgaccatgactgccgcgaaggtatctgcggtatgtgttctctttacatcaacggacatccgcacggtcctgcaacaggagccactacctgccaaatctatatgcgccgcttcaacgacggcgacaccattaccgtagaaccctggcgttctgccggcttcccggtaatcaaagacttgatggtagaccgtactgcatacgacaagattatgcaggcaggcggttatgtcagcgtacgtacaggtgctcctcaggatgccaacgctatcctgattccgaagcccatcgccgatgaagccatggatgccgcttcctgtatcggttgcggtgcttgtgtagccgcttgtaagaacggttccgccatgttgttcgtttctgctaaggtaagccagttgaacctgcttcctcaaggcaaaccggaagcattgcgccgtgccaaagccatgttgagcaaaatggacgaactcggtttcggtaactgtacaaacacccgtgcttgtgaggccgaatgtccgaagaatgtctctatcagcaacatcgcacgtctgaaccgcgacttcattaccgcaaaattgaaagactaaccgtactttctgcatttgattaatatcacaagaactcttctatcgggaaaaccggtagaggagttttttttatgataagaaattatggaacctgcttgatatcccaagcagggtaaacagacaaaaacatagaatcctgggctgcagataaagatggcttctcaacctctttcctcaaattacggggagacaacccaaaattcttcttgcagaaattagagaaatgagataaagattcaaagccatatttataacaaatttcagagattgtaaagtttgtatgccgaagttcataaagaatgccttcttttctgcgttcctgcatccactcgtatacaggctgatggaatacagaagtaaagatacggcggaaagtcgtcactgtatatccccctaattcggcaaattcttcaaccgtcttgaccttatcatgattcttaagtacgaaatactgaaaactatccgtgtatttcgataacgtatgcaccagcatggaaagctcataatccgaatagtaacgccacaggataaacgccagttctttctgcttaaattgcaatagctccctacaaatcttcccctcagccagataagacttcgaagcttccaagaaaaaattcagttcagagcatattttcaacggaaaaaagataagaggtggaaccacgtcttttacgatatgctgaaagcgtccttcacaaaaagattccggctgggaaaaacgatagcatacacactctacatcggtcatggcaagcacttcgtattttgaaccgacagcctgcagaataaactcaccggcatgcaacgtcacgcctgcatattcttcactgttgacaagagcctcaccttttaaaagaaacataatgatattgttatcgcacttgggcataataaagtgaaaccctctactatgagaggcgtataagataagattgtccacagccttggggcatttcaggcaatcggcgttaaccgcttcacaagcgggagagtcgtacatgacaggatagaatgttttgtttgtttgctctggcaaaaataaacattagcagctaacaaaaaaacatattccccgaaaactttaaaaacgttttcggggaagaatcaaaatattatgaaatcaacaggactcttatatcaaactcttatagcccggtgaatgttccgtcctcattggtccatatgccaacattcggagtaaacttaataggagtagcattgttggtcagcgtcaatgtataccgaatattcttgcccatgccccaactgcctgtaaggttaacgaccttggtatcattccaggtatactcacttgatttatctttcggtgcagcagtataggtaatctccaaagtaacgcctgtcaggtcgtcttgaggcatcagcataaacaaggcattgccggaagtctcaaaagcagtaaaagcatcaggttctgcagcagtcggagtaacggatacgggagtgccggtgtattcgtatgtcacacccgaagcagactctgccaggttactccaagcccccacggtgctacttccgtcaaaagtaaaagtagccttatcctttgcacctttaatcaccaatttcgatacggtataaataaaatcggcaacatcacccttgattgtaaagttcacctgcgtcagaagatgctggaaaggaagagaaatggctgactcagactttacctgatttattacgttggcagcaaccagatcttcctgactgtcaaccgccttcaccgcatactcgaatttcggataaccggcagcagtagtaatatccaaagtttgtgccggtgaggtagcaaaaaattgcaatttaccggaggcaggccagtagtaatcgcccttatacttccattccccgcttgatttatcaacttctatatcatccataaaacccgtatttaactgtacagttccccccatgtcatctgttgttttataagcgcttacagtaaacttactgaaattctcagtagtggcaaccaatgtctttgttccggtcttcaccactgtcccgaatttaatccggttcattgtactttcattctcaagcccttcattttcagagcaacttaccattgctgcggctgttaaagccaccaataaaatttttctcataaccatctgttttttagttaatatattaattgcttatcttgtttctacacgattatatccacattcgtttcatcatcccaatcacctatatcacctccgataccgctatttccaccttcttccttatccacctctaccgtaatctgtccatcgggaacaggcacctcaatatgtatttccccatcaggagcaggctgtatttcttcttcctcaccggaggtcggaggtgttatcagttctttgatatcaaccagaatctcctgcacctgcttatccaccttgataatcctgatggtcagcactaccggactatcgccccgcgtatccgcacttttcggaagcctgaaatgcgaaaaatgtccccgcaacagtccgtttttacaatcattctccacataaacgggcacttccgcaagtgtacacagccttctaccgagaaagtaaccgccattcaacccgctgacgcagcacacaacagccgatatattttctacaccatccaccttcacggcaaacgaataactgcttactacccgttccggtttcagtttcatcaccatagccgcttcgctttttgctatttccacatcatccaacgccacaacgtagaaatcgtccggcgaccaaatcatatcctctccggcatccattccaatacaccgttccgtatatgccctgatagtaccatagcactcatcgccttctatgcagacacattccgtattatagttgtaaactatcattgcataatggccgggcggtactttcatttccccgccggcagccggcaaatagccgtctactttccgcccctcggcatctttcggataaaatattacccgcacggtctccggcaaattctccgcaactcccgtccagtccagcgttatctgtacgccactgacaggataatcgtccagcacctccctgaaattgcaccctgacaggattatcaacagacagaacagaggcaacggtacattatatctgatattttccaccacattcatcgtcctgccgttatatgccatactaaagagaccgctacctttgtaggacccacaaaatgaaagtgtcctccattagttcggactaattcccctttataagaggtatatttacagtattccgttgtcaaataacctattcccaaactgcactcgattgcaaggtgcccggttattctgcgtgcatatccgcaggacagacccgaagtcatataatacttaccgcgaatgccactctcttctttcaactgaaaatcatatactcctccctcggtatatagccccaggaaataccctgtcaatctgttgcacagatttctgttgcccagccaacagcgtacttccacacctcccgaaagaagctgataacaaaagccattccgactgttcaaccaccaaggacatttatattcagtattcaaagaccacctctttcctgtcgaaaactcaacttccacattcggagccaacgccaaatcatatatcatattattcttcagagctaccataaccttatgtgatggtcccagcctttttcttttctcagagaacacggtcgaaaccagttctccgttgccggcagatactaccggcagtgccttctccggcatccgtattccggcaataggaaactccttcgaatgtaccgtatagctgcctatccgcggaaaaacaaactgcagcagatatttacaggccttgccttcgttcagatagaacaacagttccgtcaatttgccgaaattcccataatgataccgaattaacatcaaaacctctttcctgtccggcacattcttatcagcgagtacccaccgatatacttctctccattcgtccgattttataaccgagtccagcattacactgtttacaaccatcaatatgtcagcccgtacagatgctcttcccactgataaaaaaaagagcattataagagttactatatagatacggttcaccataactttgctttgtacaaagccaaaaataaaccattaaaattaaagaagatacagaaaaaccaactcatttagcaacttggaagattctgtgaaacgattggaagttttttgcaacttatgctacttccaatacagacaaagaaccggaatattccacgaaaagccccaacagcaagcctcgcttatccgacatttatcatatagtcattatatacactttatttaagtcaagatgtccaagcgtgcacgaaaacagtaaatattcgcaaaagaaaactaaaagaaattcagaaaaagagtaaatatttgggaaatatatgaagaagctatacatttgttacgtgatttttttcatagtattagatttaaggttaacaaaggttggagtacagcggtactcctttttttatgccaataagcaatatactcctccaaccaatgtctttaccacccctttcatctccagttcgaaaagcaaggcgctcatacggtttacgggtatgtccgcctccactaccagcgcattgatatgcaagtctccctgatgagtcagtatacgcaccaccagctcctcctcatccgtcagttccggaaacagattgcgctggataccggctgctttggcagcaggctctgcactcgcccaccccattgtttttacgaactcttcggcactctgtacaagcgcagccttattatcccgtatcaaccggttgcagccgatagaagcggcatccgtcacccgccctggcacggcaaagcaatcacggtgatagccgtcggccaaatccgctgtaatcaaagaaccgcctttagcggcagattccacaacaatcgtcgcatcgcacatacctgccacaatacggttacggctgacaaagttatgcctgtccggagtagtttcggataagaactcggtaagcaaaccgccgttgaccagcatatcgacagccgtcttacgatgtacagaaggatagatacgatccaaaccgtgagccagaacggcaacagtagacatattatcagccagggcggcacgatgtgcatgaatatcaatgccgtaggcgagaccgctcactatcagggcatcagggagaagcacggacaaatcgtgcacgaaatccgcacaaaaccgtttgccgtactccgttgcacggcgcgtacctaccatattgataacatgtaaacggttaaaatcagtgtttcccttgaaaaacaggacaatcggcgcatcctcacattcccgcagacgggaaggataggcctcatcccgcaaagtaagacaagtcaggcggttcttttctacaaactccatttcacgttcggcacgaagaaaagcggcaggacagtcaagagccgtaattatcgaggaattcacgccgggcagacgttccggcaattccttacgatacccgaaaacgtcaacggcgctacctatggcatctattaaacgctttgccccgatatgtcctataccgggacagagcgtaagagctatactgcaaagacgttcgtcattattcatggtcgaggtagggggcaaagacgttatcgaataactcgctgtcgcttaaacgtccgtttaccacacataccgtttcaaccactgccttgatggccactttattgtcacttgccctgaaaatatcctggtagaacacatacttgatgccttctttcttcattgccagctttgatacgaactcatcaccgcttttcaacggtgtcttgaaagccatattgatgcgtgctaccactggatctaccccctgttcgtggagtgcggcaaagctgacacccgtactcaacaggaactcgtgccgcgtatgctccagataatgctggtagttggcattgttgacaataccctgaaggtcgcattcatagtcgcggaccttcattttcagttcataaatataattcattataatacctgcaatttaacaatttaccatttgataattaaccgcgtttattctcgatatccaaacctttgaaccgcttgagctcctctacggaaaccagtttgtagagtttgtcgctgggacgtatcttatccgctttcatcgagaaatgctgcccttttttcaccgtctgcacgggtttcagatccacgcgcgcttcttccaatgtagtgaatacggctcccgttgtcggtcccgttatcagcagcttgtcgccgacattgatttcggcggcttccaccaagaactccgccacgccgatattcgagaagtaacggatacccttgccgacataaatcttacgttcagtagcggcagaaccgtagttccgggtccattcgcccaagcgctgccccagataatagccgtcccagaaaccacggttaaacacggttttcaggcgctcgtcccaggcagctatcttttcgtcggtaaacgtgccttccacataggagcgaatggcctccttataacattccaccaccgtacgcacatactcgggaccgcgggcgcgtccttcaatcttgaacacacgcacgcctgcatccagcattttgttcatgaaatgaatggttttcaggtctttgggcgacataatgtactggttgtctatatccagttccacatccgtttccttgtcgcgcaccgtatacgagcggcggcatacctgcatacaggctcccctgttggccgaatggttcatctcgtgcagcgaaagatagcacttgcccgataccgccatgcacaaagcgccgtggcagaacatctcgatacgtatccgctcgccgctcggtccgcagatattctcttcacagatatgacggtagatttccgccacttgctccaaattcagttcacgcgccagcaccactacatcggcaaactgggcatagaaacgcaaagcctccacattcgaaatattcagctgcgtggacagatgcacctcctgtcctatctgccgggcgtagctcatcacagccacatcggctgcaatcaccgccgagatacctgccgcttttgccgcatccacaatggtgcgcatcaggggaatatcgttatcgtaaataatggtatttactgtcaagtaacttttcataccatgctcatcgcaggtttgggcaatctcccgcaaatcgtcaatggtaaaggtattggcggaacgggcacgcatattcaggttttcgataccgaagtaaatagagtccgcacccgcctggatagctgcggcaagagactcgcgcgagcctaccggagccatgatttcaaaatcgttcaaagtagtagaattcatccaatatgaaatttaatgatgcaattatttattaccgtgcgcatccaattcccgttgaatcagtgtcacaagttccatgccaagctgttggcctgccgtcatcccttccattgtaatagcaggagtaaccgctcccagcttcttgcccgccggagattcgtagaaggctacaatcttcttcaggtcgtccaatgtcaggtgtttctgatagatgggcacatacaccttcaccagattatcgctgaaaaactgctttgccttttccattactgcgttccacgtggcctccgatacagagggggactgctgcttcatcatgccgattatctgcggaaccatcgtatccacagtggccagaccgccggaaagcaacagcattttatgcaacgtttcctgatattccttattctgcccttgtgcagaaacaggggaaatgccgatgagcagtgtcatcacgcacaatgcgactgaaagcaaactctttttcataattatttctgttgttaagtgaatgaatagtgcaaatatacagatttaaggaagaagctgtatattctttcaaggatttcactcctgcatagcgaatgaaacaggctttttccgtacttttgcaggcaaatcccgtcagattatgaagattaaagatatagacctcggcaagcaccccatattgcttgcccccatggaagatgtgaccgaccccgctttccgactgatgtgcaaaggtttcggagcggatatggtgtacaccgagtttgtgtcgagcgacgcgctgatacgttccgtcagcaagaccgaacagaagctgaacatcagtgacgaagagcgccccgtagccatacagatatacggcaaagatacggacactatggtagaggcggcacgtatcgtggagcaggcgcgcccggacatactggacatcaatttcggctgccccgtaaaacgtgtggccggcaaaggagccggtgcgggaatgttgcagaatatccccaagatgctggagataacccgtgccgtggcagatgccgtaaagatacccgtgaccgtaaaaacccgtctcggctgggatgccggcagcaagattatcgtagatttggcagaacaactgcaggactgcggcattgccgcccttaccattcacggccgcacccgcgcccaaatgtatacgggtgaagcagactggacactgattggtgaagtcaaaaacaatccgcgcatgcacatccccatcatcggcaacggtgacgtcaccacccctcaaagggccaaagagtgcttcgaccgctacggggtggacgccgttatgataggccgcgccagcttcggccgcccttggatattcaaggaagtgaaacattatctggagacgggtgaagagataccgcccctcagttccgaatggaaactgaatgtactccggcaggaagtggaagacagcgtaaaactgctggacgaacggagaggtatcctgcacgtacgtcgccacttggcagcaagcccgctgttcaagggtatccctaacttccgggaaacgcgcatcgccatgttgcgggcagagacaaaagaggaactgtaccgtatcttcgacgaaatagaaaaactgatatagtttaaattatcttacaaccccaaccaaaagagcgccctgcttttctatgggtcggcaatcatccgccgagcgaacctcattcagtcagggagtgaaagacaatgagtcagggactggcatcatttgaacatcggctgcgcaaaccaccgcttgaacatccacgttgccaccacatagagcacaatggcagagaaaaagcccacaatggcatcaatcaggtaatgcgcctgtatgtacaccgtagccccgcacagcagcagataaaaaggaagcaggcaggcaaacaaacgcctgctgccccgccatgccataatcatcaggatggtggacatgccgacatgcgaactggggaatgccgccgtcggacgctcgcccacttgctgcgagctttccaccagattataaaagaatccgtgttcatatcccggaccgggcagcagctcctggttgtggttgaagtaatcgccgatagccgggaatatcccctgcgccacgttatccccgccgatagccggaaaatagaactgcggccctgccaccggcacgaagatatatatcaggtagtagatgaagaaagcggtgactatcacgaacgacactttctcaaaaaggtcgaagcggtagagaaaataccacaccactaccagaagtatcatcggatagtagaagaaataacccatattgaacggttcgctcacccacatctgcggaaaacgcagacagaaccatacggcaggctgtccgccgaatatccattgctcgaccgaagcgaaaacatggtccaggttggggaagatacggttgaactcgaatgtgtcgggataccagtaggagagcaacgacatctggataacgatgcggatgaaggcggaaaacttgcagggcgcaagccggtaaagatacatcagcaaaaacgtcatgcctgcaatcacagcgcggtctgcaagcatctgcaccggatgatccatttcttggaaaagaaacagtatgagtatggaagtcagcagattatatatcagcgtaatcttctctaccgcaaaaagccctttacgggtttctactctcttgaataagtctaaagccatcctttatctttataccaggcaatcgtttccttcactccccgttccaggtcatattcgggactgtagcccaattcctcgacagtcggagttatatcgcattgccagttgcgttgtttcattattctatacttgtccgaattgagcgtactggtggtattccggcgtttcgcccaatattcggcgagcaaagatacaactttcaatataattaacggacatctcagacgaattacaaacggattccccagttctttccgtatcaggtcggaaaaagcacggctccggtacaccttgccgtctgccagaaaataggtgcggcgggatatttgtttctctatccccaggaaaacagcctgcacgatatccttgacgtaaacaaacgtcaaatcctgccggcggaaacccacggagaagtccgtgtgccgacggatagactttgccatcaggaagtaatccttctcgcgcggtccgtacacacccgtaggacgatagatgacgtaaggaaaatccggtatgctttgcagatacctctccgctttcagtttgctaaggccataggcggtattgggcacaggggtatccttttccgtaatcggagtataggtcttttcacgtatcggaccgaatacgctcaaggtactgataaagacaaactgcctgggaatcatgtccaactcccgcaacgtgtctacaaaacatttggtctgccggtagttcacacgttcgaagtcgttcttatctacacattttgtagctccggcacagtggataatgtaatcgaacttaccatacagttccttatgaccggaaagttgcgcacaaagctcaccgggatgcgcaaagtcgagttcaagaaaatgtatcttcttgtcctgcaaatactcccggctgctggacgaacggatgcctgcccatacgccgaatccccgcctcaacgcctcttccacgatgaaactcccgataaacccgcttgctcctgttactaaaaccgattccacgttatgaattatgaattttataaattatgaattattttctcccggtatcccgttacttcaccatttcgcccctactgtacggcctcatcatttcaccggctctacatgaatacctacatgagtgcctttaccgaactgttccttcaaggtattctcaatggccgttgccgtacggtgtgcttcttccagtgttatttttccatccatgcgcacatgcacctctatcgcgtaataattcccgatacggcgggtacgcaaatggtgaggcgaacttactccgggaaaagaaaggataatcttctgaatttcattttccacatcggcgggcagcgatttctccagcaactcatctacgcaaggaatcaataactttacggccaccttcatgatgaagaaactgacaacaaccgcggctatcgggtcgagcacccgccaatgatttcccaaaagaatagccccgccgatacctatggcagttcctatggaagaaagagcatcactgcgatgatgccacgcattggccaccactgcctgagaattcaacctcttccccttaaacaccgtatagcgataaagcgcttccttaaaggcaacggacaccaatgccgctatcagtgccagcattcccggttcctgcaaagaaccaccgtgaagaaaccgatagatagatgaagcgccattccagaaaatcccaaaaccgacgccgagcaatattatgccgataatggcagttgccaaagtctcgtatttgccatgtccgtagtcgtgtccctcatcttccggcttggaagagatacgcacaaaaacaatgacaatgatgtctgtaacaaagtccgataacgaatgtacggcatccgccagcatggcggcactatgccccatgatgcccgcaaagaacttgaacagaagcagcaggaagttcactacgctccccacaatcgttacgcggtaaatgcctttttccctcgcaacctcttccttatccatagattgtacttccatgacgtttttctaagttgttgcaaatatagtacataaatccgttatgaccggtcgttcccttataattttcagtaagacagaaagattttgaagccggagtgaacgagtgaatacatttatttgtttactttgcaagaaagataaaaagacaccagattatggctaagacaaaaaaggaaaagaaagagaaaaaagccggcaagcgaatgaagaagaaagagctcgtcaaagcactattggacttcttccacgtaaaacaagacgaagtactgtccctgaaatacattttcgaacaactgcatctcactacacacccgctgaaaatgctgtgtatggatattctgtccgaactgtcggatgacgattacatcaccgaagtggacaagcataaatacaaactgaacaatcatggtgtggagatgaccggcactttccaacggaagagcaacggaaagaactcattcatacccgaaggcggcggcgaccccatcttcattgccgaacggaactcggcacacgccatggcgggcgataaagtacgtatcgccttttatgccaaacgccgcggacgcgaagccgaaggcgaagtcatcgagatactggaacgcgccaacgataccttcgtaggaacattggaagttgccaaatcatatgctttccttgttacggaaaaccgcacgctggccaatgatatctttatccccaaagagaaactgaaaggtggaaagacaggcgacaaggccatcgtcaaagtggtggaatggcctgacaaggcaaagaatcctatcggtcaggttatcgacattctggggaaagccggagataacaccaccgagatgcacgccatcctggccgaattcggattgccgtatgtttaccccgcatccgtggaaaaagccgcagacaggatacctgccgaaattcccgcagaagaatatgccaaacgtgaggatttccgcaatgtaaccacctttaccatagaccccaaagacgctaaggactttgacgatgccttgtccatccgcaaactgaaggacaatctttgggaagtgggtgtacacattgccgacgtgacgcactacgtaacggaaggcagcatcatcgacaaagaagccgagaaacgcgccacatccgtttacctcgtagaccgcaccatcccgatgctgcccgaacggttgtgtaacttcatctgttccctgcgccccgatgaagagaaactggcttactctgccatcttcgagatgacggacaagggagaagtaaagaactcgcgcattgtgcatacggttatcaagtccgaccgccgcttcacctacgaagaggcgcagcagattatcgaaaccaaagagggagactttaaggaagaaatcctcaaactggactcgcttgccaagatattgcgtgaaaaacggtttaccgccggcgccatcaacttcgaccgctatgaggtgaaatttgagattgacgagcagggcaagcctgtcagcgtatatttcaaggaatccaaagacgccaacaaactggtagaagagttcatgctactcgccaaccgcactgtggcggaaaaaataggacgtgtacccaaaaacaaaaagccgaaagtattcccctatcgtattcacgaccttccggaccctgaaaagttggataacctggcacagttcatcgcccgcttcggctacaaactgcgcaccggcggaaccaaaacggatgtatccaaatccatcaaccatctgctggatgatattcagggaaagaaagaggagaaccttattgaaaccgtatccatccgtgccatgcagaaagcacgctattccgtgcacaacatcggtcactacggattggcattcgattattacacccatttcacttctcccatccgacgctatccggacatgctggtgcaccggttgctgaccaaatacctggatttaggcggacgaagcgtttccgaacagaaatacgaagccctctgcgagcattccagcagcatggaacagatagctgccaatgcggaacgcgcctctatcaagtacaaacaggtggaatacatgacggaacgcctgggacagacttacgacggcgttatttccggtgttaccgaatggggactgtacgttgagctgaacgagaataaatgtgaaggaatgatacctatccgcgacctcgatgatgattactacgagttcgacgaaaagaattattgcctgcgcggacgacggaagaaacgcacatacagcctcggcgacgctatcaccatcaaggtggcacgcgccaacctggagaaaaagcagttggactttgcactggttgaataggcggaattatcattgtcagttacaaaagcttacctacacatacatgaagacaattactattacaaaccgctcgcaaatagaagatatcatccgtaaatgcccttattgtacggtcgggattatcgacggagagggtaatccgtatgtaatacctatgaactttgcctgggaaaatgatactatttatctgcattcgggccccgaaggaagtaaagtagaaatggtggcacggcatccgcaggtctgcatcaccttctgtgaagggcacgaactggtgtatatgcataaacagatagcttgcagttacagcatgaaatcccgcagcgttatctgtaaaggcaaagtgcgtttcatagaagatatggatgaaaagcgacggatactcgacctgcttatgaagcaatatacggacaatgcatgtagctacgccgaaccggctgtacgcaatgtgaaaatatgggaagtgaaagtagatgaaataagctgcaaatcgttcgggctgaggccgagtgaattgaaataatctctacaaaaaactttgcccgaagtttgattgccactaacctgcatattcaaggtatcccagtcctatactcagaatacttcagtcacataggtagtctctgtataggactgagcacataactcatcataagggatattcctcaaaggcatacaacagcgtcgacaaatagcgttctcccgtatcagggagcaacactactatgtttttaccctcattctccggcaactgcgccaaccggattgcagcactgacagccgctcccgaagaaatccccaccaacaggccttcgtatttcgccagttcccgcccggtacggatagcgtcatcattggatacctgcaaaattccgtctaccacggcactattatagtttttcggaacaaaacctgcaccgataccctgaatcttatgcgggcccggttttccgcctgacaataccggagaatcttccggttctacggctaccacttgtatccgggagttatgtttcttcaaagccacacccacgccgctcaccgttccgccggtccccacaccggccacgaatatatcgaccttcccgtccgtatcctgccagatttcctgcccggtagtgcgctcatgaatggcagggttagcccgattatcaaactgctgcaaaatcagtgaaccgggagtgcttgcctgcaactcttcggcacgggctatagcacctttcataccgtctgcaccgggcgtcaaaacaagttccgcaccaagggctttcagcagattgcgacgttccgtactcatggtatccggcatagtcaaaatcaatttatagcctttggaagctgccacaaaggcaagccctaccccggtattcccactggtcggctcaataaccgttgcaccgggcttcaacagtcctttcgtttccgcatcttctatcatagccagcgcaacacggtcctttacgctgcccgcaggattaaagtattccagtttgacgatgacacgagctttcaagttcttgtttttaccataattgttcaactccaacaaaggagtattgccaactaaatcagtcagacgttgtgctatttttttcatatcttgcagtgaattatcaataagacaaaagtacggcggagtccgtttattcaaaataccataaatgtggtaaatccatactataaatgagggatatgtaggaaaattggtgagtattttatacctttgtagccactttattaataaaggatatcataatgagtccacttaattttactcacatcctgacacaggcagtcgatgagctatcggaaagcgaatcctacaaaggactgtttcaccagcacacggacggcaatccattgccttcagctaaggcattgtgcgatattatcgaacttgcacgtgccattatcttccccggatattttggaaattcaacggtcaacagccgtacggtaacttaccatatcggagtcaatgtagaaagactgttcgacctgctgaccgagcaaatattggcaggactctgtttcggcagtgatgacgaatgcagttgctgtaccgaacttcaacgtgaggaggccgcatcaattgccgcccggttcatcagccatttacctgaactgcgtcgcatactggctacggatgttgaagccgcttacaacggcgaccctgccgcacattcgtttggcgaggttatcagttgctatccggccatacgcgctatcagcaattaccgcatagcacacgaactgttggtactcggcgtgcctctcattccgcgtatcatcaccgaaatggcccatagcgaaaccggtatcgatattcatccgggagctgccataggcggttatttcacgatagaccacggtacaggtgtggtaatcggcgagacttgtatcatcggcaagaacgtaaaactataccagggtgtaaccctcggagccaaaagtttcccgctggaccaggacggtaaacccatcaaaggcataccccgccatcccatactggaagacaatgtcattgtctattccaatgccaccatattagggcgtatcaccatcggaaaagacgctaccgtaggcggcaacatctgggtaacggaagatgtgcccgcaggcgcaagaatagtacaaaccaaagcaaaaaagtaagagattttatgatttcagaattataatccataccatatgcgtaatagtaaaaatgaaatcataccggaataaatcataaattataaatcataaataagtagatgagcgaacaatcattcgaaatgattgccaaaactttccagggactggaagaaacattggcacaggaactgacctctttgggtgcagacgagatacagataggacgtcgtatggtatcattccgcggcgacaaggaaatgatgtacaaggcgaatttctgcctgcggaccgctatccgcatcctgaaacctatcaaacagtttgttgcgaaaaatgccgatgaggtgtatgaacagatcaaggcaatccactgggaagattatctggatatagataaaactttcgccgtagacgcagttgtgttcagcgaggaattccgccattccaaatttgtttcctacaaagtgaaggatgccattgtggactatttccgggatgcatacgacaaacgcccgtctgtacgcatcagcaagccggatgtattattgaacattcacattgcagaaaccaaatgcactctttctctcgattcatccggcgagtctctgcaccgccgcggttatcgtcaggaagccgtggaagctcctctgaatgaggttttggcagccggcatgatattaatgagcggttggcacggagaatgtgacctgatagacccgatgtgcggctcgggaacaatccccatcgaagctgccttgatagccaggaatatcgcaccgggcgtattccgtaaggagtttgcttttgaaaaatggattgatttcgaccaggagctattcgataagatttataacgatgacagccaggaacgtgaattcgctcataagatatacgggtacgacaacaacccgaaagccaacgaaatcgcaacccataacatcaaggcagcaggcgtatccaaagacgtaacgctgaagttgcaacctttccagcagtttgagcaacctaaggaaaaggctgttatcattaccaacccgccttatggagagcgtatatctaccaacgacctgctgggcctatactccatgattggcgaacggctgaaacatgcgtttacaggcaataccgcgtggatactttcttatcgtgaagaatgcttcgatcaaatcggattgaaacctactgccaagatacctctgttcaacggtgctctggaatgtgagttccgtaaatacgaaatcttcgacggaaaatacaaagaattcaaaaagcaggaaagcgaagagggtaataaagagtacagaccttacgctgcaagagaattcaagaccggagaaagaagagagtttaaatccggagagaaaagagaattcaagccgagagagagaagagaattcaaatcggatgataaacgggagttcaagcctcgtgaatacagaaaaccggcagacggagaatggaaaccgaagcgagaatttgacagagagcgagaatttaataaagaacgtaaaccgggagagtttcggaaacggaacaacgaacggaataacgactgaaaccgttaaaattaaaagctatgaacataaagagaatcggtaaggcaatcatggtattgctactggcaacacctgctttatcttcaatggagcttatggcacaagacttgaaaatgcccactctggaagaccttcttcccggtggcgcaacctatcgtatcgctgagaacctgccgggtttgcagtggtggggtgacgtatgtataaaacccggcatcgactccttgtttgccgtcaaccccaaaaacgggaaggagacattgctcacaacccgggaaaaggtaaataaagtactcaactcactgataactcctacggaaacaagcgcaacacccggccataagggaaataaagtacagcatttctacaataccgagtttccatggccggacaaaccgtatatgcttatcaaattgcctgcgagatacatcgtttatgatttcgagaaagatgaattcgtcaaaggtctgccgcaggctggagaaagaaacggtgcaaacattgattataccccggaaggcggacacatagcctataccgttaagaataacctcttcgtggacaacaaagccgtaaccgaagaacccgaaagaattgtatgcggacagagcgtacaccgcaatgaattcggaatcggcaagggcaccttctggagtcctcaaggaaacctgctggccttttaccgcatgaacgaaagcatggtaactccctatccgctggtggatattactcccagaatagcactggtggacaagatacgttatccgatggcagggatgctcagccatcaggttaccgtaggtatctataatccggacactcaaaaaaccgtttacttgaataccggcgatcctaccaaccgttatttcaccaatatcagttgggcgcccgacggaaagagtctttatctcatagagctgaaccgtgaccagaatcatgcaaaactttgccgatacaacagcgagaccggcgaactgatgtccacgcttatcgaagaaacgcatcccaaatatgtggagcctcaacaccccatcctgttcctgccttgggatcatactcaatttatctaccagagccagaaagacggctacaaccatctgtatctctacaatacggacggcaagctcatcaagcaactgacaaaaggggagtggctgatacagaacattttaggattcaatgccagaaagaaagaagttatcatcgcttctacggaagtatctcctttgcaaagcaacctgtacaaggtcaatgtcaataccggcaaacgtactccattggacaacagcaagggagtacacaacggaatactttccgcttcgggcaattatattatcgaccggtattcaactccggatactccccgcaaaatagagataaccaatacccaaagcaagaaaagtgtctctttgctcactgcgaagaatccttatgaaggctttgtcatgcctgccatagaaaccggtacaataaaggctgccgacggcaagaccgacttatattaccgccttgtaaagcctgccgacttcgacccgaataagaaatatcctgcaatcgtctatgtatatggcggtcctcatgcccagatgattaccaacggctggatgaatgacgcacgcggctgggacatctatatggccaataagggttatatcatgttcacgctcgacaaccgcggtagcagtaaccggggactggagttcgaaaacgtcaccttcagacacttgggtattgaagagggcaaagaccaggtaaaaggagtggactacctgaaaagcctgccttacatagacagcagccgcatcggcgttcacggctggagtttcggcggacacatgactaccgcactcatgctgcgctatccggagattttcaaagtaggcgtggccggcggaccggtcatcgactggaaatattatgagataatgtatggcgagcgctatatggacaccccgcagacaaaccccgaaggttatgaacagtgcgacttgaagaacctcgcagggcaactgaaaggacatctgctcattatccacgatgaccacgacgacacctgcgtgccccagcatacgctttctttcatgaaagcatgcatagatgcacgcacctatcccgatctgtttatctatcccggacataagcacaacgttttgggacgcgaccgcgtacatctgcacgaaaagataacccgatatttcgaggattatttataaaccggacacattttcaacagtaaacaattaaacgtatccataaaatgaaagtattattgcttggctcaggtggccgtgaacacgctttggcttggaaaattgcacaaagccccaaaatagagaaactgtatatcgctcccggcaatgcgggaacaagtgcagtgggcgaaaatgtagccatcaaagctacggacttccccgccctcaaggcttttgcccttgaacataagattgacatgattgtagtgggtcccgaagacccgttggtacagggtattttcgacttcttcaaagaagatgccgctacacagcacattgctgtcatcggtccttctgcaaaaggtgcacaattggaaggcagcaaagaatttgccaaggaattcatgctgcgccatcacatccctaccgcccgctataaaagcgtgactgctgcaacactcgaagaaggacttgcttttctcgaaacgctcaccgctccctacgttctgaaagccgatggcctgtgcgccggtaaaggcgtgctgattcttccgactctggaagaagcccggaaagagctgaaagagatgctcagcggtatgttcggcgatgccagcgcaacagtggttatcgaagaattcctcagcgggatagagtgctcggtatttgtcctgagcgatggtgagcactataaggtactgcctgtagccaaagactataaacgtatcggagaaggtgataagggattgaacaccggcggtatgggtagcgtaacacccgttccgtttgccgatgaggtatttatggaaaaggtgcgcaaacgcatcatagagcctaccatcaacgggctgcgcgaagaaggcattctgtacaaaggtttcattttcctgggacttatcaatgtacagaacgagcctatggttatcgaatacaatgtacgtatgggcgacccggaaaccgaaagtgtcatgctgcgcatcaagagcgacattgtagaactgttcgaaggcgtgcacaaggtaaacctcgacaccaagacaatggaactcgacccgcgcacggctgcctgcgtaatgctggtcagcggcgggtatcccgaaacgtatcagaaaggctatcccatgagcggctttgacttggcagcaaccacggacagcattctgttccatgccggtaccgccgtaaaagacgggcatatcgtcaccaacggcggacgcgtcatagctgtctgctcctatggagagacaaaagaagaggctttaaaaaagagttataaagtggccgacatgttaagttttgaaggcaaatacttccgtcgcgatatcggattcgacctttaacagtcaatgaaaagccaaagattccaaaatcgggttacggcgggacgatttacgcttcccgccgccatccttatatcagtagcctgctggatactgagcgctattctgttgcccgatttggaaatacggaaaggcaattaccccctatgggacattttctatagctcatgtattccaacgtggggcactcgtcttttctgcttcatcctgtactccgtcataggatattttcttatcgggctgaacaacgcctttgccatcatccgcatgcgggcctcagtacagacagccatttatttcctgctgatttccgtctgccctaccatgcacatactgtatgcaggagatttggtagcggtcacttttctcattgctctgtattttctgttcaagagctatcagcaatccaaatctgcaagctatctgtttcacgcattcgtatttataggaatggggagtctgctttttccgcaactgatattctttgttcccgtattttggataggcgcgtatagcttccagtccctgcaccccaagagttttttcgcttcgcttatcggctggagcgtaccttattggtttctattgggctatgcctatctatccggacacatggatttattctaccagccattcctggaactggtgaatttccgctctatcctatttggtttccggccttgggaattggcgacaatcgggtatatactccttttatatatggtcagttcaagccattgtttaatagccggatatgaggacaagatacgtacgcgcagctatctgcacttcctgatattcctgaacttctgtattttcgtctatataggactgcaacccgctctgtatccccatctgttctctctgctgctaatcggcaccagtattctgataggacacttattcgtactgaccaacagccggagttccaacctgttcttcatcattatgctggtcggattatttactttattcggattcaatctatggacgcttttatagatacactcatacaactcctgatagactggggatatacagggctctttatctcggccttattggcgggaagcatcattccgttcagttccgagctggtgatgctggcactcgtcaaggtaggcttgaaccctgccatctgtgttcttgccgccacactgggaaacacaatgggcggtatgacctgctattacatgggacatctcggcaagacagactggatagaaaaatatttcaaagtgaagcaagaaaaaatagacaaaatgcagcgtttcctgcaaggtaaaggagcgctcatggctttctttgcctttctgccctttataggagaagccattgccatagcactgggatttatgcgcagcaacgtaatgctgacttccctttccatgtttacaggaaaactgatacggtacatcgttatgttatcggctcttcaaggcgctttgtcggtgatgagtgtttagcggttggtaattaatatttagtgattagcgggtatggaacggattatagaacagacggaagacggaagcaccacattgtttgtgccggagttgaatgagcattatcactcggtaaaaggggcgcgcacagaatcgcaacatattttcatcgacatgggactgaaagcctccgccgctaccttgccgcatatccttgaaataggcttcggcacggggttgaacgctctgctcacactggaaacagccggactggagcaaaggccggttcactataccggtatcgaactttatcctctgtcatgggaagaggtggatgttttacattatagcgacaatcccctgtttaaggaattacacacggcaccctggcacaaagacgtgaacattacaccgtacttcacgttacacaagatacaaggagacgtaaataaagtgatgagcgacaagcagtcagcgatgagtgacagattacctgttcatcactcatcgctaaccactaatcactacttcgaccttgtttatttcgatgcctttgctcccgaaaaacagccggaaatgtggagcgaagagcttttccggcacatatatgccgccatgaacaacaacggcatactgaccacatattgtgcaaaaggcgttatccgcaggcttttgcaagccatcggatttagggtagagcgtcttcccggtccgccgggtggcaaacgcgaaatactgcgggcatccaaaacaaaggaatgagccatacacaaaaaacaaacaaagtaacggccccacagagccacatatacaaaaaaccatagatagaataaatgaaaaagatatactttctactacttgcaactatactgatagcttcctgcaaacccggaagcaaaaccaacaataggagcgaaggaaaaccggttatcaccgttaccctcgagcctctgcggtacctcaccgaagccattgccggcgaccgctttacggtagtcagcatggtgcccaagggcacaagtccggaaacctatgaccctacgcctcaacagctcgtagagcttgcacgcagtaaggcttacttccgcatcggctatatcggtttcgagcagacttggactgacaagctgacagacaacgctcctcacctgcaattcttcgatatgtcgcaaggtgtggatctgatttatgacaacacgcatgttcatcatcacgcagccaacgaaaaagagcaccaacacgccatcggtgtggagccccatatatggaactcggccgtcaacgcccaaatcatcgcaggcaatatcttaagtgccttacgtaatatcgacaaaggcaacgaagatttttatctggaacgctataatactctttgccggaagatagaacataccgacagcctcatacggcaaacgctggcgacccccggcgcagaccatgcctttatgatttaccacccggcactctcttatttcgcccgcgactacggattgcatcagattcccatcgaagccggtggcaaagaaccgtctcctgcacatctgaaagccttgattgatacctgcagcagcgaaaatgtacatgtcatcttcgtacagccggaatttgaccgccgcaatgccgaactcatcgcccaacaaaccggaacccgggttgttgacatcaatcccttatcttacgattgggaaacggaaatgctgaatatagcccaagcgctgaacccaatgaagaaccaagaatgaagcaatgaaacctattattgaaatcaaaaacctcaatgccggatacgacggccgtacagtacttcgcgatgtaaacctcaccgtttacgaccgggattttctgggtatcatcggtccgaacggaggtggcaagaccactcttatcaaatgtattttaggattgctcaaaccgctttccggtgaaatatctttcacctcttcccgcacggcaggcaacttacagctcaccatgggctatctgcctcaatacaacagcatagaccgcaagttccctatcacagtcggagaggtgattctgtcaggactcagcagcaagaaaccacttatttcgcgttttacgaaagaacataaagaaaaggcacatcaagtcattgtacgcatgggactggaaggactggaagaacgggctatcggtgcattgagcggcggacagcttcaacgcgccttgctgggtcgcgccattatttccgatcccgaagtggtaatcctcgacgaacccagtacctatatcgacaaacggtttgaggcacgcctataccaattgttggcagaaatcaacaaagattgcgccatcatactcgtcagccacgacataggcacagtattgcagcaggtgaaatccattgcctgtgtcaacgaaacactggactaccaccccgataccggcattaccggcgaatggctggaacgcaatttcaactgccccatagaactgctgggacatggaacattgccgcaccgggtattgggggaacatcatcaccattgatacccctcatatctgcctatagaaagctaacaatattttttattgggtacctaccatttgataaatatcaataactaacataaaatattggacaactcaaccaaaccataaaactcatatctaataaagttaccttcgatatcaaaaacaaatgaactgcagaaaaacattatataatgtcttggatacatcgttacatagcatattcttacaaacgttttggaagaagcttatcttttcttccaaaacgttatactccaataatatattctgcaaacagtcagaatttcacaggataatcatttaaaataataaatatcaataaattactaatataatcttatactcaaaatattcattatctaaattaaggctggtattcccttaacttaaattggtacaatggtaattccccattgataatccctattagcaggaatgagatactgcaagtcaggcatagctccccaactatcatacccgcctactcccatttgtttcatatcaatacatacttctataaaatttcttggcactatatcattaatatgagtctgccgtggtctcacatttttagcagctatgatatcatgctttagttcttcttcattacgattaagccactgataatctcgttgagtagtttcctctccatcaaaatcctctacagaattacataaagcattaaatcccataaggctatctgcatatattgttaatcccttaccattcttttccgttaaggttaaccaacgtgtatctgtatgatgaccattttcttgtggccgcacatatggaaaatacatgccatttgcagtatttctataaagacctacaaatgcaccggcattacgatcaatatagttttcttctggcccgcgcccaaagtaagtaatccgattcatttctataggaatacgaaaacgcattcctatacgtggcacagttaaaaacaatggtcttttatgaatatcttcattccctggagtaaaagttgccgctaaagtttcttcagaaacatctgccttctttgctttcatatccgtcgccgtaaaagtataatttgcttttactacacctgatggataaatgcgataaataacattatactgattcccggctggtaacaagtaagtagcagccacaacagcagcctccccttccatattaatatcagtagctgcaactttgaagtttttactagcttgtttccatatctgtaagcgctcaggcatttggttaccataatcattatcattaggagcacgccaaaaatttggctgaaagccaaaaccatccttaaaatattctacaccgttcactttataagaagtaaccaagccattctttaaattgaatataaaacgaactttagaagattcaacagccacaaaacagctatcctttctacaggttaaagtaggaccatccattttgaaaacttgaggtaatggatttatgggaaggcgaaactgctccttagcaatctcataacctataggaagtaaagcctctggttcaatagttgttacactgaactccacaaaatattctacgccactcctcggtttcaagccacttacatccacatttaataatttacttttttgaggagcgatgtctaaatacaacttaccagaacgaactatcttagcattttcttttatccaataattaatttgatattttttcaagttagtaaaataaaaacggttccatattcgaaatttaccaaaagccaaattaattgcctcaaaagctacattctgatgtacatactttacctcacaataagccggatgaggagtacgatctgggctgacaataccattacaacaaaaatttccatcactcggcatattgttcccaaaatctcccccataagcccaaaactggcagccatttacatcttgggtcagaataccttgatctacccaatcccaaatatatccgccttgcaaatttggatatttataaatagctttccattgttcccaaagactacccgtagaattccccattgcatgggcatattctgaaggaacaaccgggcgatcactcccttctttccctatattttctaaccaaatggcagtaggatattgcggaacatacatgtctgtgttccattcccactgcgcacgttcgtaatttacaggacgattcattatatttttatcagcctgttttatccacaaataagtctgataaaaattatatccattcccgccttcattacctaaagaccagaaagtaagagaaggataattcttattacgctcaaacatattaaccgtacgatacatatgtggttttaaccattcaggattattacccaaagtaccgcctttacgtaaatcataacgcataccatgactttcaatattagcttcatcatatatataaaaaccatatttatcacacaattcataaaaacgacgatcctgtggataatggcacaaacgtacagtattaatattggcacgcttcataagttcaaaatctttacgcatcaaatcttccgttagataatgacctgtttctggattatgctcatgaatattcactcctttcagtttcaaaggctgcccattaatcaacaaaacagtgtaattttttccattttcagctttctgttctattctttttatttcaatacgacgaaaaccaacattaaaaggaactacctcagtagattctccattttcttgaatagtcattatcaatttatataaattaggagattccgaagtccaagtctgcacatcctgtagttgtcgttcaaaagtaacagtttttattctaccagaaggcaagagtaattttgtttcacctgaagcaacaattttgtttaacgctccaatcaactcataacaaactttcaatgcaacagtactatccttatgattcttcatatcaatagctaccttaaaaataccattcttatagctatcatccaatgtagaagttattcgaaaatccttaattgatgctttaggttgtgaatacaaaaaaacgtcccgttcaattccacttagacgccaaaagtcctgacattccaaataagagccagtactccagcgataaatctttaatataagtatatttttccctggccgtaaaaaattattaaccaaatattcagctggatttttagaatcttcattataaccaacttcctcaccattaatatacacataacagccagatttcgcaccagctatgtgtaagtagatgtcacgtccatcccaaccggcaggtatagtaaattccttacggtaaacacctactggattctgttcgggcaatagcggaggttgcgggttactaggttggaattcataacattgattagtataaattgctgtaccatacccttgaatttcccaattccccggcactttaatcttatgccaatttgtaatggaagttgaaacatcagttatatcttcaggaaggtctttataagattctacataataaaaatcccaaatgccattcaaaagcttataatatggactattttcaaattttcctgttaacgcttgtaaacggtcagagtatgtcataaaagaagtgcgaggactttctgtattcacagaagtaaccagtacatctttccaataaggcaatgacgaatatctgaatgaacgtgacgaagcccttccatgcccttttacaagaatggaatcctccgtaatatctacaatagaatatgcattctgagttttcgtctcaatcatcccttcttgtgttatcatcggaattcctttataataaccaaatgcaccagcatggtgatgtccggaaaaaactgcctttacacaagaatattttgaaattgtatccagtatttccatattgttcaaagctgtaaattcactttggggataaaggggatgatgtgtaaaaatcaaggcattataacctttttcttcacattcagccaataagttattgagccatgtcatctgttttttactgattcccccattccaccgatgagcctgctttcctccaatttgttttatatgctctaacatctcagctaattcctgctctttttcagtgccttttacattggcataagccgaaacttcattggtattcagcataatgaatacccaattctgctttttgaaagaatagtacgctgatggcatatctaactgttcataaagtatagcatcatctgtcacttccttatagtcatgattgcctgtaatatgataaatttcattgtcaaggtgtgatagatagaactttatcgaatctaaatccatattcttcctatcaataatatctcccaaattaacagtaaactgaacattttgttgattaaaacagtcaatgcaagtatccaatttttgcaatgcttgtctataaaatcgagtattccctggtggacaatctccatattgagtatcggcaaataatccgaacctgataaccggagaagtattttgtgctactataccgcttcctacaaaacatagatatataaataacctgataaatctatccataacgaatcattttacataaaacaaaggaaaaatctgttgcgaaaaagcaacaatattctaaacgaaatgaagaatctgcagacaaagcttgaatgtttacagattcttcactcgcataaacagagaaaatatataaaaagaccttatacttttctctctcaatctgattaattcatttttttcacatccgattcactcaaaactcctttatacaatctggcatatacaattttcccaataaaagaattttgaatagaaggaattaccacatcacgataatctccgccaattcccatcaaataatccggtgcctgatttttttgggggaaattaaatgagccagaaactttcatttctttcaccttattgccgttaaggtacatcctaaaagtggttttattatatgttacaacagcgtgataatatgcattctgccccacttgtattggtatttgaaaattattgtttggtaacacccatttattatttgccctatagtagaatgcaagtttattatcactggtcatttcatatcctaatccaccactttccatcgaagagaatggattgactcctccatcaggagaaaataagatctccattgaaaacattccttgcattgcatttccaatagcatcttctttagtgtatggaacataaaaaaaattagttccgtcaaaaacagcttcgtattttgcatatagagtattccaacgggttacgattgcatttgttgtaccttgaaccactggtaaagaagaaagaaccttacctttatttgtcgctacaccactatctgcaaattgcacatccaacacaagttttggaatctcttcattagggaaacctataataagcacggccaaatggctatatttctttatcttttcctgaatatcaggctcattataatatatcctataattccaggcatactgttttactggcctattattaacttgcgcattctcaaaattagcttttataacttcataaacatctgaatcaaaacttatcccatctacattattctcttgcatagactgcaaccaattttcacaaatctctctttgttgctgttctgtttttcctaccaagctgttccaagtcgagtaaaaactaacattccatccatcattggcaaatgaggttaaatgagtgatataacgactttcaaccaaaacacgatctttaatgtcatatttactatctaaacggtataaagtctcacgaatgattttttcattttcatcggtactcaaatctttaaaatcaagccacaagaaattaaaatctggtttcatctgaagaagatcatccatatattcctcaaaagtttttcccgttgaagtttctaattcatgcccaatcatcagtacagggttgccattttctcgagaaacatgaatatctacttcaaagttagtaattccataatcaatagcatctcgtaactttacaatatcattacatttatgtgcacctaatatcatttcatctcccaaagcataaggacaaaaattgctctttgtcaacggaacctcattattaacattcagcaaatcagaggagcatgacgagaaaagtataaatcccaatatcatgctcaatataaagctctgctttttcataaagattattattttaataatactaaattaggttatcaatcccatcccggattatttggcttcagagcaagatttctctcgatttcgactccaggtataggccacaacatatctctatcaagaaatgtacgagtcatcattcttcgtccagtcgctccatatacatctcctggaagtacatctttagcaatattccaacggcgaaggtcgaaccaacgatgaccttcagcaataagctcaacagctctctcgtgtttaatgcgttcaaaaacttccgattttgttgttgcttttagccaagtagcaccactattgatagcaggcatattagtagaaggtctttggcgtactttattgatgtactcaacagctgtagtctgatcatctaattcattcttgcattcggcatacatcaaatatacatcagctaaacgaatcaacggaaaattaataggtgtatcttcgcggttattaatttctccattcatattacctactggaacaaattttctaaatatataagactctcttctattagttcctacccgaataaaaccatttacttcattaggggtttcattacgagcaatcacaaattcacaagttttcggagcctcattcacccagccatcataagtagtataaggcattataatagtttgcatcatcctaggatcacgctgtttatacatagcaagtaacttatccctattttctggatatgcttcaatagccttacctcctttagtcagtgtacaaacataagttttatcctttacctctatactagttgtgaaacccggaataatttcttcccaatcaaaagggcgtccatcttgatattcatacatatccactagtttagtagaaggcaatgcagaagcccaatcactgccataagtagcgcggtttcccatataaaaagcaatcggcattccataatccttacctactccacctgagttttggattgcgaaaatcatttcattgctctcatctccttcaggagtaaacaatttggaataatcctcatataaagaataattataccctttaccagatttatccaaaataatctcttcaaaatcagcgactgcctttgtatactctttcatatataaatacacttttccacgcaaggcataagctgctcccaaagtagcccgtccatactcacttacatcccaatgtaccggtaaattatgagtaatagcaaaatccaaatcatcaagaataaattttaagacatctgcttctgtacttctaggtttcttcatattgttatagtctgtactcaaattaacagactcgtcatataaaggcaaagctccataaaaattgtataattcaaaataaaacagagcacgcataaacttagcctcagccacatactgctctttctgactttcgctcatactttctatttcggctattttccgtataaccaagttggctctcattacaccatcaaaaagtgactgccactttttctccacaaaactggaacgttcattgtaaatacctgtgataacatcactgtatgcctcgttaccaaaaccagtaccaatatcggacatactatcaaaagtaaacttcaacccaaaagcatcatctacctgcattgctgcatatacccccatcatgccttgtttggcatgcgtctctgatttccaaaaaattccatcactcacttgatcggatggatatctatccaaatcataacaactgttcaagcttaaagatgctaataatatacctgccaataatttatattttttcataaagcattaatttaaaatgaaagattaataccaataacagcttgtttcattgccggataatcaacaccatctacttcaggatccaaaccgtcatactttgtaaacgtaaagaagttttctaaactgccatagatgcggatacgttcgactggtaaagaagggaatgcagattttgaaaagctgtatcccaattgaatattcttgattttaaggaaagacctattctgaatccaaaaatcgctgatcaaagtattccggttatcgttaaactctaaaagacgaggatacttagcagttcctggcattataccttcatgccaacgcccatcggcaatctccttatttaactgataactatgacgaacagaaggacggaaataattatctagccaataagtttccactccagtaactccttgcaaaagaacagagaaatcaaatcctttataagcaccacctaaatttaatccaaaagtacattttggagtagcaccattgcctatcactgtacggtcatcatcattaataacaccatcgccattaatatccttataaagcaagtctcccagttccggcgtattagaaggaaaagttttcttgactttccccgtagctggatcaatcggagtattatctatcagctgttgaatataagctaagtcttcttcagtctgcacaatacgatctacaacataaccatattgcacatttataggatgaccttccttaatcatatcagcattcgtaatagcactctcatttcctttaaatttagtaaccttattcttgatgaatgttacattcccatttataaaatacgagaaatctttgatttggtcatgccaacctaaactgacttccacgcctttgtttactacaacacccgcattttgcctaggaatagacgcattaccatttaccaatggagctggaagatcaattaaaatatcttctgtcttcttatgaaaatactctaaagtaccacttaagcgattcgcaaaaaaactaaaatctattccggcattaaatatcttagttttctcccaagtcagattagcattaggaatagccaacatagccaaacctgtaataacattgctattcaaaacataattggatgcaccatacaaagcctgtgcatcataattaccttcaatatctgaattgatagctctcaatgtgttattacctaacataccataagaagcacgtaacttaagattgcttaacgctattttttctgcaaaatctttaataaaaggttcctcactaattctccatgctgcagaagctgaagggaaatatccccaacgattcccttttaagaaacgcgaagaaccatcagcacgaaagtttgcttcaaccaaatatttattatcccaattcaatttaatacgcccaaaataagagcgcatcacccactctaccatattaccagaagatgtagctgcaccaacagctccatcaagtgcacctaatcccggatcaatcaaatcttgttttgttgtcttgaaccatttatagcgaaaaagttcctgactagctcccgccattatactatagtcaagctttgaaactttattctgataggtagcagttacatccatcagataattattccatttataatcactatccataaaggaagttttgcctattccggtagaagtcactgtttcattctgaaaattccattgttcaataaaaacaggcttggaatcacttgttttattacgaagcatatagttaaatgaacccgttaatgtcaaaccttttagcgggactaaagttccataaaaacgtgccttcaagtatctgtcttgattttcgccatctgttttatataaacgatatagaggattgttggccgcattctgaggatcatcttcaccattgttagtagctccaaatctaccatcagatgcgcggaataccataccaggagaagtagctgcagcatatgtaaagatgtcctccatcttatctgtaccaggttctgtaaaagctacatatccatttatattagctcccaattttaaccaagaagccacatccatatctaaatttatgcgtgcctgtgattttttataaccagagttctccataactcccggattatctaaaaagccaaatgatgtataaaaacgaattttatctgaaccaccactaatagaaacgttatgattatgactcaatgaagtctcgaacatagcatccattaaatttgtattcggatacttcaaagcatctttcccttcattttgacgccataagtctatagagttggtagaatatgtggttggaagattagaattagtaagtccctcatttattaactccatataatccgcataattagaaaccaggtcaaaagttttccccacagattcccatgaaatataaccattatattccacctttacctttccttgcttacctgtacgtgtagtaatcaagataacaccattagcagctcttgaaccatagatagcagcagaagctgcatcttttaaaacagaaagactttcaatatcttggggctgaacactactcagagaaccttctactccatcaataataaccaaaggagccgaattattcaatgttccttgaccacgaaccataatagatgcagtattttcacccggtttgttagaactagaagttacttgcacaccggcagccatacctgccaaaccttgtgacacatccgtaatcggacggctttccgccagatctgctacattaatattatttacagaaccagtcaaatttactttcttttccgacccatagcccacaactacaacttcatccaaagcttgtgcatcctctttcagagttatttttaaatctgtaatattagcagaaattttaatctcctgagatatatatccaatatatgaaatcaaaagtatatcacctgtagatacaccaacaagggtaaagtttccatctatatccgttatcacgccatttactgtgccttttactatcacattagcaccaataatcggttcaccaaatacatctaagacagcacctttgattgtcttttgctgcataatattttctactatatccgcatggggtgatatagaaacagatccagtttctactgcccataacgatccagtagcaagtaagaccaaggatgctcccaatactattcttttagaaagagagccgtagtgtttaacattcattttcataagtattttaaagatttgttgtttttaacgttgcaagtttacatctttttactttatattcattatgcaaattatccaaagtcactattaaaattatccatggacatttttaatagaattcaggaagattttcatagttcatgttacattgctatttccatgtcatacagatttcactcctgctaccattaaatactcccaccataaaatagaaagacttagacttttagtctatcaaaataatcagtccgacaataatcccatatattctgtattattgtacaatccatttttttctaaatgaattaatattgcagtgttaaatctatccgatttataaaactgaatttgaatagaattttagaagatatcaaaagcagccaacacttatcaaatctttaatagaaatatgaaaacaaaaattatttttttaattatcctttctttttatctgtctgaaaatgcatttgctggagaaaaagtaaaacaaccaataaacgaaaggaaacaatggagtgacctttgctataaaatagcacaaccaattctagaaaatatgagcaaaggtgaattacaaaaaaacatgcagttagaacttagtcctacttgggatggacgagataaacgggttagttatatggaagctttcggacgtttgatggctggaatttctccttggttatctctatctgatgacaatacacctgaagggaagcaacgcagtcaattacataaatgggcactccaatcatacaaaaacgctgtaaatcccgaaagcccagactatcttttatgggaaggtcctacccaaatattagtggacgccgcctatattgccgaaagctttctccgtgctcctcaagcaacttgggaacaactggacaaaataacccaacaacgctatatcgagcgcttcaaaaaattgcgcacaattcgtccggcatataataactggctcttatttcgcgctatgacagaagcatttctacttttcatagatgaagaggccgatcattttgcactcacagtagccatgaataaactcaacgaatggtatcttagcgacggctggtattctgacggtccagaatttgctttagactattataattcctatgtaatgcatcctatgtttgtggaaatactggaaatttgtcaagcaaagggcttccctactcccatcagtcccaaacttgcaattcaacgcatgcaaagattcaatatctttattgaaagacttatctcaccagaaggcacatacccagccttcggacgttctgtagtatatcgattgggagcctttcaatcactgtcacttgctgcctggaaatacggattacccaaagtactatgcaatggacaagtccgaagtgcattaacttgtgtcatgaataatatgttctctatagaaggtaattttgatgacaaaagttttctcaaattaggatttgtcggtcatcaaccagaattggcaaattattataccaacaatggaagcttgtatatgacatcgcttgtttttatgccattagccttgcccgccaaccacccattttggagtgaaccagctgctgactggacttctcgaaaagcatggagtggcaaatctttccctattgacggacatcactctctacgtaattaacaataaaaacattatatcaaaaaaataccatgagaaaacatttactcttatctatcctattggtctggtcggttagtatttatgcacaacaagccaaatatgtattttatttcatcggtgatggcatgggaattaaccaagtacaaggtacagaaatataccgtgctgaactaaagaaaaaaacgggaatctcccctttattatttacccaatttccctactctactattgcaaccacctattcagcgagcaaccgtgtaactgattccgcagctgccggtaccgcactagcaactggacacaaaacccaaaatagtgcaattggcgtattaaaggatcagaaaactcccataaacagtatagccgtatgggctagaaacaaagggtgtcgagtaggtatagctaccagtgtaactgtaaaccatgctaccccaagcgccttctacgcacatgcagccacacgtacactctatcatgagattggtaaagatttatataaagctgggtttgatttctatgcaggttccgacttcaaagaaagcacaaatcctaaaaatccttcagctgaaaacctatatacaatggccgacaaaaatggttacatcattgctcgtggctataaagagtacttgaaaaagagcaaaaaaactagaaaaatgattttatttcaaacagaagaggcttcaaaacatgaaatagctgctataccttatgccatcgaccgtcaaaagggagatatgacacttcaagatattacccgctctgccatcaatttcttatccaaagatatatcaaaaggttttttccttatggtagaaggaggaagaatagattgggcttgccacagcaatgatgctgcaactacctttcatgaaatcatagattttgataatgctatcaagatagcttatgaattttatttacaacatcctaatgaaacccttattgtggtaactgctgaccatgaaaccggtggttttgtcctaggaacaggttcttataaccttaacttacaagttctgaaaaatcaaaaagtaagtgaaaacggctttacaagaattgtaaataaaatgcgtacaagaaccaataatcaagtaagttgggaagctatccaacaagcactaaaagaaaattttggattttgggataaagtaaaattgacagaaaaacaagaagctcgcttaaaagccacttataatgaaagcctgcaacatcaaaaaattaatttggaaaaaagcgaatactcccaagacgaacctatcgcagcagaagccaaacgtatcattaatgaaattgcccaaataggttggattagtggtggacattcagcaggctatgttcctgtttttgcaatcggagtaggagctgaactatttcaagatagaatagataatacacagatccctgcaaaaattgctcaagcagccggatatatacaagaataacaactaagattcatttgctacaactcttttctgataattctgcggggtacatccatattggttcttaaaacaacggctgaagtataccggagaactgaaaccagtcctatcgctcgcttcagatatgggcaaattcgggtattgtcggagaagggttgctgcatatttcaaacgataattcaatacaaagttattaggtgtcataccagtcaatgctttaaacttggaatacagcaatgaacgcccgatgcctatccctttgcataattccggtatattaaagtctggatcatccatgtgttcttctattatttgagaagttttacgcaatatttcctgatcaagcggatttatactagtcaaatcaatttcagacaaaggttgtttttgaagttgatgctgtatcaacaaacgattccttaccaaattattggcccttgctaaaagcaactgtgcattaaaaggcttacttatataatcatcagcaccacgatttaacccctctatattctgctctgtagtattaagtgctgttaacagaataattggaatatggcacaaatcaatgtgattttttatctgcaaacacatttcagtaccactcatttcaggcatcataatatccgatatgattaaatccggtttatattcataagctaatgaaagcccttctttaccattattcgctaaataaacttgataaaatggctcaaagagctgttgcaaaatatgcaataactcattgttatcttctactaaaagaagcttacgtccatccccccgctctgattcatgcaataaattatcctctggcattgatgtattaacctgatattcaaccacgtctttcgatggtaattcagaagtaataatttctggagtattatccataaactgaacatgttcatcattctgataaacattcatattaagcgataaagtaactgtaaaaatacttcccttaccaacttcacttttcacgctgattgtaccatgatgtttttctactatactttttgtaagggccaatccaatacctgttcctggtgattgttcggttcccttctgattttctccttgatagaatcgatcaaagatatgaattgaatcagaagcaggaatgccacaaccggtatcgtaaatctgtatttttacgcttccgctatccgttgctattgtcattcctatctccccacctttaggagtatatttaaatgcatttgaaaggagattgaaaaagactttttccaattgttttgcatcaaaccaacagattatttctaccggattacaaataaaattatagtgaatatcggattgatgggcataatcactgaacgaaaggtatatctcctttagaaatttacctatatcttgtttccttatctgcaacttaaaacaattcagtgtaaagcgtctgaaatccaaaagttcagatacaaggtttgtcatttgctgagcactccgctttatcttcaatatcttattatatacctgtggagataacaattgattttgtaataaagtatctatatggctaacaattaatgtcaacggagtacgaaattcatgacttacattagtaaaaaagaccaatttggcatgattcagctcttcaatatgctgcttttccatacgctctttttccaacgattgtgctaaagccaatttggttattcgattccacgcataatacgcaatgacagaacctattgtaatcaaataaaacatccatgcccaccaagtcaagtaccaaggagtagcaatatgaataatcaaactgattggagacaggttagaagcatgtgccatacgcacatatagagtataagtgccaggatcaagatttgtatatctagcttctgaaacagaagtataagtccatgttttatccaaaccatccagtttatactcaaacccttgttgggcatgctcattccgataatcagaacgggcaaatctgacaagtaaattgttttggtctgaacccaaatttaattcttttacgaaaggtagtgcagcagttaataccttctctttaggagaaggaagtattagttcattatcgatataaagagtagaaaaataaagagaattaatttctacttgagacgtttgaaattcttcttcactcaacaacgttacaccttttgtatcaccaatataaatcctattagcagaagacacataaatgccacaatcacgaattacaggtgctttaagataaatttctttctgtaccaaccttataaaagtctgttctaacgaattaaatagagtaattccttggtcaccagtaagaataaatttattatcagtggttttcttcatattataacagtaattactggataattcactgtttgatgtattataagcaataattttctttgtatgtctgttataaaacaacaatccacttcctaaagtacaaacataagcaccatctttcacagcaagaatacgtgctattccgccttgataacccattttttgtatgggaacagatcttttttgtgataaatcatataaagaaacaattataatctcatctgattgattaacatataaatttccagcatcatcaatatcgaagtttgtacagtaagaatcgggtttgaataaaaaagtaaaaagattactcacaggatcaagtaagaaaataccttcacgagaagaaagataaagttttccattccacatttttacttgataaataaaattatgtggagccagattccctcttgaactatgttcttgataattataaaactgattcttttggatgtcataacgggataatccacctaaatgggtccctatatataagtaatcgtttttctcatcataacaaatacttttgatattattatatggaatagagttctgatgacctgcagtaaattgatgtattaactcccaattctcattaacgcagctaatacctccaccatctgtacttatccaaaggttaccatgtttatcttcgaccatctcacctatgtaagaataataaagattagaacgattgccagcctgataatcataatgcacaacaccattacgatccggactgaagtaattaactcctccataataactccctatccaaatagttccttgctgatccttataaagagagaaaatagaaggatgattcaatcctcctacatattggggaatctgtattaatgtataagtctgcttttgaatatcatatttttgtaaacctgcaaaagtaccaaaccaaatattatgttcattatcctccacaaaagctcgtacctgcggattacggattccgatattactagtaggagtgtgaggtaccttttgcaatacatcattttttaaacgatacaatccctgcatacgtgtaccaatccagacctcttgattcgaagcttcgaaaatactatatatatctataccactcaacataaaatgggataatcctaaagacttacgaggaataatacaaagcccatccaccatgccgacataaatattggtatcactaaccgtcaatgtatttactgtatgagaaggcaacctcaaaacaaactgcaactgtttcttttggcaatcataagaaaaaagagagtcattacaagtataccaaatttcatttctacaagcagccaaagctgtagtcacattacctttcgtatattgtttataatcagaataaaaaatattataaccaaataaattattatctgctatgaaaaaaatattaccttcatcatcatgtacaataaaagaaatataatttcctatccaaaggctatcaccttgtatgttagttatattaccttttacataagtaatttgttctccatcatacatattaatgccttcctgagttccaaaccacattcttcccaaaccatcttgtgctatactcagaacagacggttgagataatccattttgcaaacttagattacgaaaatactctgcatttgccgaaagaatatttaagaatgaaaacaataaaaatatgattcggtttttcattagttttttatattttatatgaatacaaaaatacgcaaaaaagagacaatagagaaatcaaaagactataaatataatatatacaaaactgtcatccaataatttgatgttctattcttttcttgttctatcatcaattttcacaattaaaacacttaatagtccaaatcttgactttttctctaatatatttccacctcatctaaattaaatgtgcaattttccctaaactacaatcagttccaattttaaaattccccctatatctctaaaccaatcctaataatccgccttattgtcacttatttagaactgaaatcattatctttgcgcccatatatgccgaaattaaaataaaaccataacgaatttcatccgaatgaaacagtacaaaaccgtaaacaacctgattggttggattacctttatcattgcagcaacggtttattgcatgactattgagccgactgcaagtttttgggactgcccggagttcattaccaccggctataagctggaagtaggacacccgcccggtgcaccgttctttatgttagtagccaatctgttttctcagtttgcttccgatgcctctaccgttgccaagatggtgaactacatgagtgcactgatgagcggcgcttgtatcctgttcttattctggagcatcactcacctggtacgcaaactggttattaccgatgaaaacaacatcaccaaaggacaactgattactgtcatgagcagcggtctggtgggtgcattggcatacacattcagtgatacgttctggttcagcgccgtagagggtgaggtgtatgctttctcctcactgttcacggcagtagtgttctggctgatattgaaatgggaagatgtggcggacgagccgcattccgaccgctggctgattcttatcgcctatctcaccggattgagtatcggtgttcacttgctgaacctgctctgtcttccggctatcgtgctggtatactactataagaaagtgcccaatgccaacgcaaaaggttcgctgttagcacttctcgcatctatggtgctggtagcggttgtgctgtacggtatcgtaccgggcatcgtaaaagtgggcggctggttcgagctgttctttgtcaacacgctcggcatgtctttcaacagcggtgtcatcgtatatatcatcttgctggcggcttgcctcatctggggtgtatacgaaagctacaatgaaaagagcaagtcgcgtatggcactctcgttcatactgaccatagccatgctgggtattcctttctatggtcatggcggcagttccgtcgttatcggcattatcgttatcgcgttgctgtggctctatctcaaaccgggcacgcaggagaagattaaggagagataccgcgtatcggcacgcacactgaacacatcactgttgtgcaccatgatgattgttatcggatattcatcctacgcgcttatcgtaatccgctccaccgccaatacgccgatggaccagaattctccggaagatatcttcacattgggcgaatacctgggacgcgaacagtacggtacacgcccgctgttctacggtccggcttactcctcacaggtagccctggatgtaaaagacggatattgcgaaccgcgcatctcctacaacggaaccaaatacatccgtaaggaaaaggccactgacgacgagaaagacagctacatcgaaatccccggacgcatcgaatacgagtatgcgcagaatatgctcttcccccgtatgtacagcagcgctcatgccaaccaatataaggcatggcaggacatcaagggatatgacgtaccctacgacaaatgcggcgaaatgattatggtgactatgcctacgcagtgggaaaacattaagttcttcttctcctaccagctcaactggatgtactggcgctatttcatgtggaacttcgccggacgccagaacgacttgcagggtagcggagaaatagaacacggcaactggattaccggtatcaagtttatcgacaatatgcttgtaggcaatcaggacttgctgccgaaagagctgaaagagaacaagggtcataacgtattctactgcctgccgttgctgctcggaattatcggtctgttgtggcaggcctatcgcggacagaagggtatccagcagttctgggtagtgttcttcctcttcttcatgaccggtatagcgattgtgctctacctgaaccagacaccgagccagccgcgcgaacgcgactacgcatatgcaggttcgttctatgctttcgccatctggattggtatgggcgtggcaggcattatccgcctgttgcagcattatgccaagatgaaggaacttcccgccgccgctatcgtttcagtggcctgccttttcgttcccatacagatggcaagccagacgtgggacgaccatgaccgcagcggccgttatgtggcacgcgatttcgggcagaactacctgatgtcattgcaggaaacgggtaatccgattatatacaccaacggcgataacgataccttccccctgtggtacaaccaagagacggaaggcttccgtaccgacgcccgtacctgcaacctcagctacctgcagaccgactggtacatcgaccagatgaagcgtcccgcctacgactctccttccctgcctatcacgtgggaccgtatggagtatgtagaaggtaccaacgaatatgttccggtacgtcccgaatacaagaagagcatcgatgccctgtatgccgaagcagagaaacaagccctgagcggcaacaccgaagcactggtaaacgtgaagaaagaattcggcgagaatccttacgaactcaagaacatactgaaatactggatacgcagcaagaacgaggacctgaaggtaattcctaccgacagcatcgtgatgaaagtggataaggaagccgtacgccgcagcggaatgatgataccgggcgattccatccccgactacatgcacatctcgctgaaaggcaaacgcgccctctacaagagtgagctgatgatgctcgaaatgctggcggaagccaattgggagcgtcctatctacatcgcagtcagcgtagggccggagaaccaactgaacatgggcaaccacttcattcaggagggtctcacctaccgtttcactccgttcgataccgataagctgggtgtgaaaatagacagcgaaaagatgtacgacaacctgatgcacaagttcaagttcggcggcatcgacaaaccgggcatctacattgatgagaatgccatgcgcatgtgccactcgcatcgccgtatcttctcccagcttgcacagcagttgatacgcgaaggcaagaaggataaggctaaagccgcactggactatgccgagaagatgattcccgccttcaacgtgccatacgactggcagaacggcgccgtacagatggccgaagcatactaccagttgggcgattctacaaaagccgacgacatgatgaaagcccttgccgacaaagccgtggaatacctcacctggtatctgagcatggacgacaaccgcttctccatctctacccgtgaatttgaatatcactgggcagtgctcgatgctgaagtgaagattatgaggaaatacaattccaaactggcggaaatctacgctccgaaggtagaagagttgtacaacttgtatgcggaaagatacgaaagattacaaaaaatggaaaaaaaataatgccggtacacggtagcgaatgagcggattaccgcaggtacatcctgccggtaaacctgcccattcgccaccggatgcccggcatcagtcaataaccgttaaccaccgattaaccgtgtttatagaacagccacccgagtttgttcgtaagttatatcccagcgccgtatggcgaatggacccggacgagagagccgtctatctgactttcgatgacggacctatccccgaagttactccgtgggtactcgacttgcttgacaaatacgacataaaagccaccttctttatggtaggtgacaatatccgtaagcaccctgatgaattccaaatggttgtggagcggggacaccgcatcggtaaccatacctttaaccatctcagaggatttgaatacaacttcaaagattatctggcaaatgccgagaaagccaacgaggtaatgaaaacagacctgttccgccctccgcacggccacatgggatggacgcagtacatgatactgaaacgccgttataagataataatgtgggatttggtaacccgtgactacagtaagaaacttcgcggaccacaggtgcttgccaatgtaatgagatacgcccgcaacggctccatcatcacatttcacgattccttaaagtcctggaacaacggcaacctgcaatatgcactgccacgggcaatagaatttctgaaagaagagggatacgagttcagactgttatagaattatagagttataaagttgagagttgaaagttttcatgcagcacaattgcgcagcctgactttcaactctctactcttttcagtttacttttaccgtcagcggattacgcactttctgagcgaaatcagccatatatcggttccaggcatcggcagtcttgatatctgccttatcccatgcaaatccccaataatatacatattccgaacccggttcgtagtcgcttacagcaagtacatgaccgtcggcattgttgcgttctttcttttccttttcagagaaaagtacggttttcgcatctttgacaacagcgggaaccgcagcacccataaagattttaccgttatcgggaccggtcgtagggtctacataagtaatgtaaccgttagcagcatcggcaacgacagctccatcgggttcatgcaatacgatgcctgcaacgataggcaatgtttctttcagattactgtacgatacggcagtcttgttcaaatgcgagccggcatcaagtgtaatcaaacgtgtttctaccacggtcgaatctccctttacagtcagcggagtaaactccagcttcaccgtaaaacgtaacgggccgttatccagaatctcctggttcttatagcaccacggatagataatcgtatcgtttaccatcagtgcggctacaccggctcccaatgtaggacctaccgcatagcagtccatcccataaccgtggtcgatgtgataagaacgctcgcggcttaactcggcagcagccttcgggtcggtctttttcagttcggcaatcttggcaagcgtttccttgtccagttctttggcgtacatggcctccagcatcggttcggtagtgttatacttcgtaaacaggtcataaccgaaaccacgctctcctttagcctgcaaagcaggaccgtaagcgcggaaagccaccaaatcattctcccaagccatatcatccatacgttcgggatagcatctgccgcaggcctttacatcaaaagcctcaggcgtaccggtttgtatggtgtacgtagcggtgccgccagcagctatcgcagccgggaatataaccttgccgtcgtacgtaatctgataaggcacttgctgcccgtcggcattcaatactacaatctgtgccgtgtccgccaagcccaggcggtctgtaacagtttccatagacacctctaccatttcattggagcgctccatggccaacggattggttaccgtaacggtcaccgtcctgctgtcgttgcaagcgaagcaaaacaaggccgtcatacctaataaaagaagtttcttcatagtgaataaataatgtgataaagtggtaatgtaacaggatggtaatgcgataatgcagcaggtgatgaagcaaccttattataaaaaataaggcggtaaagcaatatcctctatcacttaccgcctcactaccttattacctgttatttcggttgttttccgatgtaagccaagataccgccgtcaacgtacagaatatgtccgttcactgcgttggaagcctcagatgccaagaacacagcaggacctgtgagttcttgcggatccaaccaacgaccggccggagtcttagcgcaaatgaatgaatcgaacgggtgacggctgccgtcagcttgtttttcacgcaacggagcagtctgcggagtagcgatgtaacccgggccgataccattacattggatgttgtatccaccgtattcggagcagatgttacgagtcagcatcttcaaaccacccttagcggcagcgtatgcagatacagtctcacgacccagttcggacatcatggagcagatgttgatgatcttaccgtgacccttcttcatcattgcaggcagaacagccttagaaacgatgaacggagcattcaggtcgatgtcgataacgcgacggaaatcggcagcttccatttcgtgcatagggatacggcggatgatacctgcgttgttaaccagaatatcaacagagcccacttctttttcgatagtagccaccatagcctgaacagccggttcatcggttacgtcgcatacataaccatgtgccttgatacccttttcggcataagcagccatacctttgtctaccagctcctggttgatgtcgttgaaacagattttcgcaccttgttctgcaaaagccgaagcaatggcaaaaccgataccgtaagaagcacctgttacgagggctactttaccttccagagaaaaattcaaatactgattcatgatgtttatttattttaggttgaaaaaatagtgttatttcaaatcggtaatcaaggagaaatcctggtcgccgtaatccagattctcgccgcccatcccccatataaaggtataattgtgcgtagctgcggcagagtggatagaccattcgggagaaaggacagcctggtcgcccttcatccacacatggcgggtttcgtccacctcgcccataaagtggcagatagcatggtcttccggaatctcaaagtaaaaataagcttccatacggcggctgtggacgtgtgccggcattgtattccacacactgcccggagcaagttccgtcatgcccatttgcaattggcaggtcggcagcacctgatttaccagcatcttgttgatattacggtggttggagccttccaaagaacccatctcagccactaccgcatctctcttcgtcactttcttgtcgggatagttgcgatgagccgttacggaattaaaatagaacttggccggatgagcctcgtccttgctctcaaaagtaacttcacggtcgcccgaacccaggtagagggcttctttataatccatttcaaacacagcgtcgccggctctgaccacgcccggtccgcctacattgaaaatacccatctcgcggcgggtcaggaaataaggggctttcaacgggtcgatagcctccagttgcaacacctcacccaccggcatggcaccacctaccaccatacggtcgtacatggaatataccatattcacttcattcggggagaatactttctctataaggaaatcacgacgaattcttttcgtatcataacttttcgcatcttccggatgcgcagcgtagcggatctcatagttcgttctcatgattatattacctttctttaattttcaaaattaacagccagcggtacgtcgtttacgtacacgattgcaaatgtagcaaaagaaaacggcaaaacattgcttttttgtcctaattatctatcaatattgtacaaagaaaggaaaaatcatcagaaatgtcctaatattgaatgaataaatcaaaagaaaaaataaaagagaatcctatagttgccaaccgtgccatctatatggcaaacccgtgccatataatagacaaagttgtgccactatattggcacaactcatatactaatgaaaaaagctccgacaatcatcgactgtcggagcttttttcgttggactaccaagattcgaacttggacaaacagaaccaaaacctgttgtgctaccattacaccatagtccaaacatatgcgctttctgttaaaaagcggtgcaaagatagaagtatgtcccgaaatatgcaaatatttcgggacattttttcatatccctatattattttgcaataatcagataatagttcttcttgccgcgttgcaccagcagatacttgtcatccaataaatcagcagttgtaacaacctgatcgaaagcagccagtttttctttgttcaaagagacgccgccgccctgcaccagcttgcgcatttcgcctttcgatgcaaatacagccgcattgtctacgaacagatcaactgcctttacaccggcagccagcgcatcacgggatacctcaaactgaggaacaccctcaaacactgccagcaaagtatcttcgtccagctttttcaacgcctccgatgtggcattgccgaaaagaatgttggacgcatcgacagccgcgttgtagtcctcttcggagtgtaccataatggtgacttccttggccagacgcttctgcaggacacgcaagtgcggagctgcttcgtgctcggccgtcagagcctcgatttcttccctggacaaagaagtgaatatcttgatgtagcgggctgcatcggcatcgcttacgttcagccagaactggtagaacttataaggagatgtatagcggggatcgagccatatattgccggattccgtcttaccgaatttaccgccgtccgcctttgtaatcagagggcttgtcagggcaaatacctcaccgccattggtacggcgaatcagttcggctcccgtggtgatgttaccccactggtccgagccgcccatttgcagcttgcaacctttggtttcgtacagatgcaggaaatcgtagccttgcagcaactgataagtgaattctgtgaaagaaagaccgtcgcgggcttcaccgttcagacgcttcttcaccgaatccttagccatcatatagtttacggtgatatgcttgcctacttcacgggcaaaatcaaggaaactgaagtccttcatccaatcgtagttgttcaccaactccgcacggttaggggcatccgaatcaaaatccaaaaacttgctcaactgcttcttcatgcctgccatattgcgctgcaatgtttcttcagtgagcagattgcgttccgccgacttaccggaagggtcgccaatcatacccgtagcaccgcctatcagtgccaacggcttatggccgcaacgctggaagtgacgcaatatcatcacactgcaaaggtgtccgatgtgcagggagtctgccgtagggtcgaaaccgatatatgcagtcacctgttcctttgccagcagttcttccgtacccggcatcatatcgtggagcatgccacgccattttaattcttctacaaaattcatcgaatgattaactattaattatttgatttatactttgtctgcgacaaaagtacgactctttatccgaacaaacaactcttattgtttaaaaaagactttggcgatattttcccgtatcgcttccgtgagttccgccaaagatacgcgacggacttcggctgcccggctgtataaatccgcaaccggcacggagctttcgtcagtttccaggaacagacggtcggcaggagttatccgcagcgcctcttcctgatatttctccccgaaagagagataaaacccatgcctcagacattcctccgccagagccgctttcccgcgaaaaccatgaataatccaggggttggccggctttatctgctgtttcaacttcagcaactcactcatagcctttaccaaatgaatgaccaaaggcttgtcaagctccacagacaaccgtgcctgatattcaaaaacctttatctgcacaaccatcggagcatcggccaatttatccagtccggcttcccctatggcaagaacctgcggatgcccggctaaagaagccaaaacattcatttcattccgaacaaccggagtaacggttgccgggatatgccagggatgtatgcctaccgaataccacgccccctcttccggaacaaaagtatcgggataacggttcgcaatagccgttccgggcacaggcggcaagcgatgcgtatgtatatcgacaggaaatttcatggaacaggatcatatccggaaccaccccagggatggcaacgcaatatacgttttaccgccagataaaggcctttgaaagggccatgtttcttaatagcctcaactgcatattgagaacaggtaggagtaaatctgcacgaaggggaagtcatgggcgaaatgcacttccggtaaaaataaataggaagcaacagcagatatgaaagcaggcgtttcatggcttcataggcgctacggctgccatattcgcatccgatacggtaactttctcaacaatacgcgccaaagcagtcttcaccctctcttctattacggaagattccgtcagctggtcggaaaggtaaataaaggcaatggccaaccggcacttcttttctgccaaagcgttcaacagttcatgtttgtttacacggtaagcctcgcgtatctgacgctttacgcggttgcgcttcaccgcacgtttgaagcggcgcttcgaaacactgataagaatggaagcatccgcctccagctcctctaccggcaaatacaccacacgcaacgggaagaccgaaaacgaacgcgaaccgcccgcaaacatcttctctattatcttttttttatccagcctttcgactttatgtaaggtattcgccatgaagtataaggtataatgtaaaatatagagggggatatgaaaaaacgggctacaggtagtgctgctaagattccgcagtctgcccgccgcccgttattgcttcgttacgattataaatgtatccgacaggcttataacttataattcataacttatacttcttttcactttcccttgttgttctcctttatgaacatatcaagcgctgccgtcatagagggcgcctgcacactgggagcttccaaatccaaacggagtccggcatcacggacagcctgtgctgttgtagagccgaatgttccgattttaatctctttctgctcgaaatccgggaaattcttcttcaaagaagacacaccggcagggctgaagaataccagcatgtcatagtcaaacttttcatccggagtaaaatcattacttaccgtacgatacatgactacttccgtatgctggattttactcttgtccaacagattcttaatatcgtctgtatgtacatccgacatcggcaccaaatacttttcagtcttatgctttataatggaagacaacaggtcatcaaactttccggtatttccaaagaaaatcttacgcttgcggtattgtacatatttctgaatatacaaagcaatcgcctccgtcacacagaaatatttcatggtctcagggattgttacgcgcaattccgtacaaagatgaaaaaagtgatcgattgcatgacgcgaagtgaaaataacggcggtatgatccaatatagagaccttctgctgtctgaactcttttgctgaaaggctctctactttgataaacgggcgaaaatcgattttcacaccgtacttctcggcaatgtcgtagtaaggagatttctctgatgccggtttcggctgcgacacaagtactttcttaattttcaacgtcctaaaattttattatcaaataatcgtttagttgtatcactccttggtatagcataaaacaaggcatgatttcaagggcacaaaagtacaaaattaaaaggaaactgccatgtaaattgctacaaaaaagcttgaaccacttatagaacatcaatattttagtaaaaaaggctaaaatcaatccaattattactgtaagttgcagacttaaatcgaaataaacaataaacagtacaaacgggaaaagagtgaaaccaagataataaagcagggtagaatatgactcaagccaaagagtcgtagtactttcgtcaaaaaaaatccaacctaatacagagtataaaatccatttcagaaataaatacaaaagacttatcccgatataaagccccaatagcgcaaaaggcggaacatgatgcaccaattctggctgaatatcattgcagtaattaaaaatgcagaccccggagagtatgcaagtctgcaaaatcaacaatagcaggtagcgcatatcacccgccgttgaggttgcaaatatgctggtacgctcacgatgcaacagaaaatcctttaccagctgcaacagaaacctgcggctacgggaaagcacataggccgacagaaaaaaacaacatagcagcacaatggtgatgccgtcgtccattctcggagaatagggaataggcacaccgtccgctccaccgggtatccatgccgccaaccaactcatcatatcgctgcaaacttacggatagaggcatcccacaaaggtacggtatgtaccagttcaaccgcttccccggctgtcgcggctacatgccagatggtactgtgctgcgcacgcatgaagttttcgtctacagccttctgcaacatagccagcaacgggtcgaaataccccttgatattcaatatgactatcggattcagatacagtcccaattgtttccaggtaatgacttcgagcaattcttccaaagtaccgcaaccgccgggcaatgcaatcacagcatcgctcaaatccgccatcagttgcttgcgttcatgcatattttccacctctacaagcttggtcagtcctgtatgatgccacccctgctcaatcataaaacggggtatcactccggtcacctcaccgcctgccgcaagtgtggcatccgccactgcagccataagtcccatattaccagcaccgttcaccaaacggatatgccgctgccccagcaacgttcccagttcacgggcggcattaaaaaaaacggggtctattttagtgctcgaagcactgtatacacatacggaggttatcttattcatcatctttcagctatatcaattattaccttgttgcaaaggtatatgattttaaggagatttgaaaaaagaagctgctcattctgccccggaatattccgaaggcagaaaggcagctttctataataaatagctgtaaagctatgctgattactgttttctttaacgaagaattagaggccgaaagccgctttcaccttatcaacgtaatccagtttctcccaggtgaacagttctacagtcacgtctttatcgccttcatagcgagacttgaagtgtttggtgacaacctgcggctcacgtcccatatgaccgtaagcggctgtttcctgatagatagggttacgcagtttcaaacggtcttcaatggctttcggacgaaggtcgaaaagctcatcgatctttctggctatctcgccgtcgctcatatttacatggctgcgcccgtaggtatttacatatatattgatgggacgcgccacaccgatggcgtaagatacctgtaccagcatttcatccgctacaccggcagctaccaggttcttggcaatgtgacgtgcagcgtatgcggcgctgcggtctaccttgctggggtccttaccggagaaagcgccaccgccgtgtgcacctttaccgccgtaagtatccacaataatcttacgtccggtcaaaccggtatccccatgaggaccgccgattacgaatttgccggtaggattcacatgatacttgatattatcgttaaacagcgacaatactttctcgtgatggatagacgcgatgacacggggcatcaggatattaacgacgtcgttgcggataatgcccaacatctcctcgtccgccttcagctgtgcagcttcgctgtcgtcggcaggctgaatgaaatcatcgtgttgggtggaaactacaatcgtatcgatacggacaggattgccgttatcatcatattcaatggttacctggctcttggagtccggacgcagatacgtcatcacctctccttcacgacggatatccgccagcacttgcaggatacggtgggcaagatccagggagagcggcatatagttttccgtttcgttagtggcataaccgaacatcatgccctgatcgcccgcaccttgttccataggatcccggcgctccacaccacggttgatgtcggggctctgctcgtgaatggcggaaagcacgccacacgaattgctctcgaacatatactcgcctttggtatagccgattttcttgattacttcacgcgcgataagttgaaggtcaacatacgctttggttttcacttctccagccagcactacctgtccggtagtaaccagagtttcgcaagctactttcgaactggggtcatacgccaacagtttgtcaagcacagcgtccgatatttgatcggccactttgtcggggtgtccttcagacaccgattcggatgtgaataagtatcccatttcaattagaaattaaaaatgaataattaaaaaggagatgaggaaagagtcattaatgagtaggtatgcaaatcccggtacaccggagtaccgtcagaaaaggatgtgttttagcatttttttccgtggttgcaagctacccaaatctttccacatatcgttttcggctgcaaagataaaggttttatgggaatatggtacacaacgggcaaagtattaactaaaaaacacgcttattactgcaaaatatctatttttgcaaaaaaagtgcgccgatatcccatcgccgcactcccataatcgtttctatattgttaacttcaaaaaactcaattcaacaaatttcgataaaacctctcgacatcctcccatttgtaataaggaaacatatcagtctctaccggaatatgcacttcattctcattgtgcataacctttaccagaatatccccggacttctcgttccggaaaaagataatctgtacattagcagccataggaacaactttgaagtcgctccatactttataaacctcatagggatcactaactgccacattacagttttctatccgcatcaacgcaaccaaaggaatcacattaccatcgtgcccgaagcggagagtagcggcaattccccctttccggatagcctcgtcagcactgtccagaatatttcttaacagagatttggcattggccactacaataccttttccatcggcatgattggcattccccacataaaaacggtaattgacacactgccacaaatcaaataattcctgtgcttcgaacaaatcatagaaagaaacttttgtttcagcattctgcatgtcactggctacccagtacattccccacatcagttccttaggatttactttctttaagacaaagtgtttatccttgaacaaggatgcaaccaaacgctccggattggtatgagcttcctcaaatttcctgtattcctcggcccaaggaccgtcctgggaagaagtaaaacggttggattcgtcggtgtgataattcagataatccatatatttctcacttgcctcataagaaatccgcaaatccggattcagctctttcaaacggtcaccaaaagccaccatactcatagcacaacgcaatacaacggtagaacgggcagatataaagggattgcctttgaatacctccggaaacgaagcatacattctttcagcaatgccgcgatgctgcctgactcccaatggagtcaaatccccgccatgtccttccgcctcttcccataccttgagcaaacgccggtaggtatcttcacccaaaccggtaagcgcatgtgcacgatgcgcctcttcaaacaggtctaccagccatttataatcacggtcgccaatcaggtaacgggaaccatgccgtccgtaatgactgatataaaaaggcttatatcccttaggcgctttagtctgtggcgcgaaatccaacggatatgcccaatagactcctcccgtcttctcaggagtagcaaacatctcttctttggatgtctgtgccccaagcggagcacagcacagcaccatcaaaccacataacagaatttgtttcagtttcatcatatttttactttattactttatagccatcgttttgcaccagagtaggattgttcgtcagttcactttccggaatcgggaacaaattgtatttatcgtccacatccgcccctaaacgcacaccgtttttccaatcccagttattccctttcgtatatttgccgaaccgaatcaaatcggtgcgccttgtcaattcagaagccagttctttctgacgttcaaccaacagaaagtccagattaagctcattggccgtaatttcaccggacacatcggaacgcacgccgtttttcgcatatttaccggacatataagcccttgttctgacctcattgacataccccaacgcttcactttgcgtaccgttcgctccgcgcaaaatggcctcagcagccatcaaataggcatctgctgtgcggaacagcggaaaatcaatggaagtataggcatctcccgaaggacaaagttcatcctctttcgtaacgtttctccacttgatataaccgtatccgcatgtaaacgtactggtcatatccatatttacatcccatgtgtctttcacctgattaggaagagcggtcatgaactgtgctctcttatctttcttattatttccccaagtatcattgccgtcgaacatgacatcatccgcatcgaacgcatccaccaatgatactttagcgcggacattaccccagcctctggagccgacaccggtcttataaagttcatccataggaccgtttacaaaagctttcacatagaaattcgttccggcagaactctgtgcacgcaagccgtcctgtaccagcggccagataatctccttacaggtattattatccgctaaaaagatttcacgataatcggaagccaatggataatgcccgtcggcaatgacttttaccgcataagcatatgcttcctggtatttattctcattaatccaagtctgtgcattcagatacattcgggccagcaggaaccagccggctacccggtcaacacgtccgtactcattgcttcccggagctttcagttcgttttcgatagccagcaattcactttctgcaaactcaaaaatctgcttacgcgtatattgaaccggaatttctttcacacccgtattttcatccacataaggaaccgcaccaaacaaatcgcaaagcatcgaatagcaataagcacgtatgaagcgggcttctgcgcgatagctcacataatcatctttcatctcttcccaaagtcctctgctctgcaacttgccttccgtacattcacgcaaaagctcgttacaataggcaatactcatataaagtctctggtaagtccatgtaatgaccgaagcattggaagcatcccactgcaaattcaaacatttacgcaaaccgttggaagaggaaggcatcaaaaaattatccgtactcaactcctgcaaataaaacaacaggcgcacataaccggaatagccctcattagcaccttcgaggtcgccgtcacctccgtcaccacctttctgccctgtcagaaccagtgatgcataacactttgccaaaacaccggtgtagccgtcttttgtctggtataccttttcacttaccagctggttatcatccaaaggcatcgtgtccaggtcgcccaagcaagaaaccagacttatgcccgcgaagaacaaaataaacgaataagcaattatatttttcatattgtatagttttaagccgttagaaatttaaattagcacttaatgagaatacgcgcggacggggatatacctctttatcgatgccgctgtaaatctccgggtcgataccggaatagcttgtaaaggtagcaacattctgtacaccgaacgtcaggcgtaaagagctggagctattccataacttctggaacgtatatcccaaagaaatattgtcaatacggaagaagttgcccttttccaggaaataatccgaataaagctgctggttctggaaaccggaatctttggttctgcgcaatatgttggagaagttgccctgatcgctgtacacggattgtacatactggtcggcagccacatagttgtatacatagttgccgaatgccccgtgtccgctgatggcaaaatcccaattcttataagtaagctgggtattgaatcccagataggaagtaggcaatgcgcttttgtccgtagcatatttggtttccgtggcagagatggaaccatccggctgcacatactgcccttccataggtttgccatcatcgtcataggcctgctttgccaggtagaaagtataaggacgctgacctaccataaacacctgaactgtcttgcccgtaccggaaatggctcctgtctgcacaaaattggcatccgaatcgataacattcagcttcgtgatttcagaatcattccacgtataattcatgcctactgtccatttccagttttttgtatgtaccggcactgcattgatggcaaattccacacctttattatccatctcgccgatatttgttgtgatgacggaagaatagttggttcctgaaattacattgatagtattcagcaagtctttcgtatggcgttggtaataatcgacagaaccgtaaatgcggttgttcagaaaaccgtaatccaaaccgatattgtaggtttcggtagtctcccatttaatatccgagtcataaccgttcggacgataggtataataccatttgtctccgaattgataacaagattccggataagataccgtaaaggtagtcatatacggatagtcattcagaatatcctgctgtccggtctgaccgtagctcaaacgcagtttcaagtctgacaacacttccgagtcgcgcaagaatgcttcctgactgattttccatcccaacgctacggaagggaataatccccaacggttatctttggcaaaacgcgaagacgcatccgaacgtaaagtggcggtaatcatatagcggttgtcatacgagtaattcagacgtccgtaaaaagagagcaggtaatattcagactcataatgattgggcgaaaacagttctttgccttccggagaaagagtggttgcatcgaatttcttccagaaatgctgccaaccgtatcccgccattgcgctgaaattatgtttttcattgaatacatgagcatagttggcatataagtccagcaagtagttacgcttgttctgtttagaatcatacacaagccctgtaccgtctttcatgttagatgtatacatcataccggccatatcgggcacattcttggtatatttgcttttcagcacatcataacccaaattcgcattcagctgcaaatcctccaaacgatgtaccttataattgatagcggcattaccgatggagcgggtcactttattatgcaaatcctgcaattcaagctgtgccacaggattatcggtttggatagccatgggggagtttccattcatccagatgaaataacccagtcccggttcatcagcacccgttgcacttccggtcataacaggacgggtagggtcatatcgcaatgcattattaacgacactctcatctactttctgattgtcttcatacgaaaccttaacattcaaatcaacggtaagatggttatcaaagaatttgggtgatataccgccattaaaggtaaagcgttcgtagttgtttgttttcaccacaccgttctggttattatagcctaccgacagacgataaggtgcatttttcttcaccttgccggaaacggaaaagttgtgctcttgtccgaatgccgtacggtaaatctcatcctgccaatccgtggaagccgtccctaaagttacagaacccgggacacccgataccgtaggaacaaattcacggaattcatcggcagaaagcacatccaatttttccgtaatggtacttacagaaaggttagtggaatagttgaaacgcagattggaatcggaccctttcttagtagtaatcacaatcacgccattagatgcccgggaaccgtagatagcagttgccgaagcatctttcaatacggtaaatgtctcgatatcgttcgggttgataccgccgattacgtttccaccaccttcgatagtggagttatccaccggtacaccgtcaacaacgattagcggatcattggatgcggaaagcgatgcaccgcttctgatgcggatagtagcacccgctcccggagcgccggagcttgcaacaacatttacgcccggcactttacctaccaatgcatcctgggcggtagttcgcagtcccttattgaaatcatccggcttgatagcggttaccgaccctgtcgcatcagacttcttcacactgccataacctataacgactacgtcttcgagcatctcactatcttcctccatcacaattttcatcattggagaaaccgccttttccacatctttatagccgatgtatttaatgagtaaaacagctttggggctgcttacagtgattgtgaagttaccgtctacatcactgattgttccatttgtcgtccctttttccaaaatattggctccgataacgggtagattgtccctgtcaaggatattgcctttcacaactgtcttttgtgcagaaacccctacactgaaaaccaaagcgagtatcataaacagataccgccactttcctccaaaagtctctggatttttcttgcctttcataatgtttttaaattaaagtgtaacaaagtataccgaaaatccggtatgaattagattgtgagcgaaagtagatattacaaattcgccgaacaaagacactgaatgaaaaagtaagtgaaaggaaagtattatataggataatacatttatttacaacgacataccaaacacactatatgttgtaaaagtaagtccggaggaagtgttttttaaagcttttgtacctgaacagccaggtcttttccgggaacaatcgctttattccgcattttcaaacgatagttatatacggtttgaagcgaatagtgaaggaagttggcaattttggaattatcgttgatacctaaacggataagtgcatagatacgtaattcgggagtcagcaactcgccttctttcacctgtatacgttcatcctcttttaaaagagcattgaacgattccacaaaatccggaaatatagataggaagatagtatcgaacttactgatgaacagtttgaaatcttccgttgtcgaagactgattatgaagcattttggaaatatccgccatagaaccggtattgacgattttcagtaaactcttgcggttattctcctgcttataaatatattcggaacagatattgaataacaaaccgatatactcttccttaatatggttggattctttaatctcttcattcatccgggtcagatttccggtcacttcctgtaagcgttggttctgttcggccaacgacttctttaccttcagcagattatgatttttcttacgaaggaaaaagaaaacgattaccaatgcaataacaagtatggataaagccaaaagaaaaaacaagcccctgtctctatcagccttgatgcggctgtcattggccgctttgataataggaagatattcggcaatatctattatgcggtaacgggctttcccgaagctcacatcttccagtgaacaggagatataattataggctcttgcaatgtctccttcctgaaaaagcaggattgccaattgctgcaaagacatatatactttcttggcattcgctatgtcggtaatggaagcccggataaggaagtgctttgcctgctgtatgtcacgtttgcccaaatataattccgccaacagatattccaccctcgccttgtcggggttcgtatccgtacagtgttcataatatccggtcagtatccggatagcctcatcccattttccctgcaaacccaggcgaccgcactgattggtcacataactggccgtattagggtcgctgatagctatcaaagtatctttataagcctttatctgccgcataaacagccgcttcctggaagcctccgtttcatcattatagcaggacagataggtagtatgatacagataataaaagtaagtatccttccgtactgccccggttcttttcaccctgtcaagaacactcaacgcattttcatgttttcctatcttattcaaagcgtcggccaggttcattaatccttgattaacatactcttcacccaacctgtctgccaattgcagcctttgctccgctacaatcagcgccgtatcgactttaaaggagcggtacataacaaacaaatcgcccagaatatcaaacttagctttatcgtctcccacataatccagcatcttgcggagctctgtaatctccttttccaccttctcctgatagacctcccgttgctcaatcatcttatccagctgcaacagcaaggcatcgtcatcagtcttatccgcggccgccaaaccggaataaaaacaaaaaaggaacagtatgaaagccgaatatctgaacatgaacaaacttatttatgcacggaaacaaagatactatttttcacaacaactcccgcatctttttctttaatatcggatgcaccaggtccggtgcaatctccgccaacggttccatcacaaagcggcgttcgtgcatcagcgggtgaggcagcttcaattcgggagtatccagcacccgatcatcgtataaaagcaggtcgatatcaatcacccgatcgctatagactccgcctacagacttatgcgtacgccctatctcgcgttctatttcctgggtgagatgaagcacggacaaaggcggaagaagcgtttccacgcaggccgccgcattcagaaacgtatgctccgaagaaaagccccacggagcagtagcataaaaagcggacagggaaacgactttccctacccgctcttctattttccggacagcgaggcggagattgtgctccttgtcgccgagattagttcctaagctaaagtaaacgtacatcatttaagtttagtgattagtgttcagtgattagcgattagtgccctacggcgtaataacgcaacatgcccgcatagtgctaatcactaaacactaaccgctaatccctaaccgctattttacctgtctgttatcaacatcgcatctccataagtaccgaaacggtaatcctctttcaatgccacgttataggcttccatcacctgctcgtaaccgccgaaagcggcaacaatcatcagcagcgtggaaagcggcatgtggaaattggataccatcgcattggccaccgtaaagtcatacggcgggaagatgaacttattcgtccagccttcatattccttcaaatggccatctgtgctgacggtactctctattgcacgcatcaccgtagtacctacggcacacacctgcctgttcaaatccttggcacggtttacaacctttacggcttcttccgtaacaatcatctgctcggaatccgtcttatgcttggtaaggtcctctacatcgatgtcgcggaagttgcccaaaccggcatgcaatgtaatataggcaaagtcaattcccttaatctccatgcgcttcatcagctcgcggctgaaatgcaggcttgccgtaggagccgttacagcaccttcgttgcgggcaaagatagactggaaacgttccgaatcctccggttccacgggacggttgatgatgctgtgcggcagcggcgtctcgcccaaagcgtacaatgccttcttgaactcgtcgtgcggcccgtcatacagaaaacgaagggtacgtccgcgcgaagtggtattgtcaatcacctcggctaccatagagtcatcttcaccgaaatagagtttgttgccgatacggattttgcgggcagggtctaccagcacgtcccacaagcgcaactcctcattcaactcacgcaacagaaatacctcgatacgtgcaccggtcttttccttgttgccgtacagccgggcaggaaacaccttcgtatcattaaagataaatacatccttatcatcgaaataatccaaaatatccttgaacatacggtgttcgatttcgcccgtctttctgtgcagtaccatcaggcgcgactcatctctataccttgtaggatgtaaggcaatcttctcttcaggaagtttaaacttaaattgcgacagtttcataatcagttatgagttataagttatttattgtttatttcagtatattttttagtcataaatggcatgagttatccagcagtatactccttcgtagcaataacttataacccatcactcataactaaatcctgcccgtctatccactctttgaaatcaagcggattcagacagtcttctatgcggacatcccccacacgggtacgttccagggccgtgagatgagcgccgctatgcagcgcttcaccgatgtcgcgtgccaaggcgcggatgtaagtgcctttgctgcatactactcggacttttatttccggcaggttgcattccagcagttcaatctcgtcaatcaccagcaacttgggtttcagctctacctcctcacctttgcgggcaaggtcgtaggcgcgcttgccgttcaccatacaagccgaaaaagcaggcggcacctgctgtatctcgcctgtgaacttcttcaatgtctcctccaccagctcccgcgtgatatgctccgtaggataggtagcgtctatctcgtgctccaaatcataggaaggggtggtagcgcccaaccgaatggtggcgatatactccttggtatgatactggaactcctcaatccgctttgtcgccttgcccgtacatactatcatcacgcccgtggcaagcgggtcgagtgtaccggcatggcctactttcaacttctttaccttcatccgccggcaaatgtggtaacgcgcatgccctacgaccttgaacgatgtccaccccagcggtttattgaaatacagaacttctccctctttaaaatccatcatcacaccacctctaaattgtgtcccgtaagcaacagcagaaggatgattcctccgacgatgatacgataccatccgaatgccttgaaaccatatttcgttacaaagctgatgaagaacttgatagcaagcaaagccaccacaaatgccaccacattgcctattatcagcgccggcagattattcatgataatctccgttcctccgtccagaaagagtttcagcatcttatataccgtagctgcaaacatcgtgggaacagccaggaagaaagagaactcggccgcagccttacgcgtcatcttctgtgccataccgccgacaatcgttgccatggaacgggacacacccggtatcatcgcaatacactggaacagaccgatattaaaggctttcttctccgtcagaacggtatcctcactgtttttcgagaatatcttgtcacagaacagcatgaacacaccgccaatcacgagcatcacagccactacggtcacgctctccagcatttcgtcgaccttgtcgctgaacagaaatcccagcacagccgccggaacgaacgccaccagcagtttccagtaaaaatcaaacttatgcaggaagcgtttcagcgcggaagtatctgccggaaccggagtatggttcagacggaagaaacgtttccaatacagccagaccaccgaaaggattgcaccgaactgtatgattaccgtaaaggctttcacaaattccgtactctctatgcccaacagattttgtgtaataatcatgtgtcccgtagaagaaaccggcaaaaattccgtcagtccctctacaatagcgataataatcacttcaagcgtactcaaatctcccatagttattcttctgttttatcttctgttttcggtttacgtaatactgcatatatcataaagacaaaccccagcaggcataccagcggcgccactttaatgcgtcttacactaaagatatccggctcaaagtgtgtcggtgtggatacgggaccggtcattaagataaaaccaagtatcactaccgccatgccgacagcaagcaaaataaaattggtcttgtcgaaagcgaacttctgtttactcatctgtttatttactatttaacgatttactatttactatctgaaactttgcttttcggaaagcagtgttatatgtaatacagggtgcttgccttcattttcagatatttgttgatggaaagcaatgcacacaaccaggtaataagcactccgaacaccagtacggaaacagacaccagcagcatcacctccggagtgataaccctgatcagttccggttcgtaagaaaccagccaataggcggctccccacaaaatggcatcggcaatgacagccgacaatacgcctatccggaagttgcgccgcaggaacggacgcctgatgaagccccagcttgcccccaccagcttcatcgtatggataaggaaccttttggagtaaatggtcaggcggattgtattgtttatcaaggcaaaagagatgaaagtcagaatgactgccagccccagcaacatcagactgatattgcggatgttctcattcaccgcatcaatcaggtctttctgataaagcacctcctgtatatccgtattcttcctgattttcttctctatcttggcgatgctgtccgaattggcgtaaccggaatgcagtttaatttcaatggacgccgtaaaagggttatagccgagaaactcctgcgggtctgttcccattgcctcggtctgctcgcggagcgcctgctttttggagatatactccgtttccttcacaaacggttctttatccagttttttctgcaacttcagtatatcgctctccttcatgtcgtcgctgatgagaatggagaagttgatattctcctttacgtatacggaaaggttgtgagcgcccaatacaaagaacaccaccagccccagcagcagcaacaccaacgtagtgcttatgctggatgtgatgaactgcatatcaaaacagggcacagacttgtttttagctttcttattcattttcaatcccttctcacatttatcactctaccgttttttcgctctttttcttacggaatacgtaaatcatggagctgctgcgttctttccttaccaacgcatgaaaccatgccagcgtaccgacaaccatgccgcgcagaaacgggcacgaacgacgcatgttcttctccgtcaacatagacacgtaaaacgcgtcaaacggcatgggatgccgctctgccagaataaagccgtgtctggagcctaatttctggatagtagcgggagtgaaatgccacaaatgacggggaacatcgtaggcagcccaatatgcaccgtactttctggcatcatatgaagaacagttgggtacggccactatcagcacacctttgtccgtcagcaacgaattcaaggtttcccaagtcccgttcaatgcttcaagatgctccattacatgccacaacgtgatgacatcgaagctccccggctcaaaatccttcaacgcagtatccggcttcacttccaatccgaaatgttctttggcaaacacacgcgctccggcattcttttcaacggcttccacctgccagccggcacggttcatcgtatcggcaaagtaaccggtacccgtacctatatccagcagacgccccgtcttgcgatgcgcttcatgcgctaccagacgcgctttccgcttcagcatataactgcgtacacggtggtatacggagttcatcgctccttttttcgtatccgagtgggaaatataatcgggagtttcgtaatagcgtccgatttccgcttccacaggaaaatcctgagtaaagataaaaccgcaatcccggcaacggcacaaatggaatgcctcgcccgaagcataatggtctatgcaggtcaaggtacgctccaaatgcgttcctccacataccggacaagcttttatagtgagtttattcatcgaacgtttaccgataaggaaatgcagcctgaaacggacagaccgcattaatcctaaatttggtgcaaaataacaaataaaaagtgatttacaaggctttcattaaggagatttaatattaacatgaaataaaagtccgccctactgcaacccgatattgaaaagacagagaaatcccaactcaggttttcttcacaaaacggaccggttatcacctttgtgtccgttcttaggcggacaactgtccgataatgaacagagataaaaacaagaaatacactgttaatcaaacagttaatctattggcacggttattgacttttataatgcgaagacgttcgagaaaaaaagacggaaaaagcaactttttatatcggcagtcacgtctaacggtaaaacaggaatagtaacaataaaaaaataaagattatgaaaactacaaatttattcaaagcagtcgcattcgtagcaatgattatcgtaagtatcatgaactcagaagtcaaagcccaggacagattcattaccaatgaggaagtacagaatgacctgatagtggcaaaaaccatcttcagacaaagcggaacttacctctacaaccacatgcgttatgaatttacatacgatgacgaaaaccgcctgacaaataaaaccgcctccaaatgggacagcgtcaaagaaaaatggatgccttatttcaggatgtcctatcagtatgccgacaatgaaatcaccttatcctacgcccgctggaacgaaaagcatcagtcttatgataaagatgtgagaaagagcgtgtacgaaatgaatgcggagaatatgccggtagcctacaaaagcaaccgcatataccacacggtaaacctactgacaatggcagaataatgaaaaattaaagttaacaatacattaataaggggagtacggtccgtgaggttcgtactccccgtctttgtaccttactcagagttcttttacaaaataagtcaaagtaggcaaatggtcactgtatccgttctggaaagtagttccggagaaagtgcgcaacggatagcctttatactttccttcctgctggataaggaacggacggttaaagacttccgatttccaaaacttcaatgtactgcggtcctttcctatcagattacccgaaacaatctgctggtcgaacaagttccaccgattctggtaacagagcgaaccgatgccttgctcaaagagcttccaggtagcattataataaccgccgggcttcacttccctgatgctcttcacagctcccagcacttggctgcaactcttgttatcggggtcgtcattcatgtcgcctacaattatcacctttgcctgcgggttatcggcatgcagcgagtcggctatatggcgagtgatgccggctgcaaactcgcgcaagggtgatgatttggaaccgccatagcgtgacggccaatggtttacaatcatgtgaaaaggctctcctgccagtataccgctcaccaaaagctggtcgcgtgttttatagcccggcatgtcgggcttggcaaacggataagtacgtgcagacacaaaagtaaacagtcgcggattgtaaagggcagccacatcgatgccacggtggtcgggactctcgaaatgcactatccggtagcccaatgaggcgataggctctgtctttaccaggtcctccaggacttttttgttttctacttcggagatgccgataatggcaggtccggcaggacaatagtcacgcgccaattgtgaaatcaccttggcaacattctgcaatttctgttcgtatttgacctgtgtccattcgtacttaccgcccggagtaaagtcatcatcgcccggattatccggattgtcttccgtatcccacagattctccagattataaaaggcggcagcatatacacgcagcttgccctgtgcgagcaagccggtggacaggcataataccaaaaaagctgacaatatgagtcgtctgttcataaagcgcaattttttaattaccggtaggagtaggttcgataactgttccgccgttaccggtattgccaccggtaaccgctgttacttttactttttgtatctgccacctcaaagcattagccgtcgaactcttataatggaacgcaaattgaattttcttacctgtataagtatccaatttaatatcaccggaagcaacgaacttattatctgttcctgtagaataggtaggaatgccgacttctgtccatacgtctcccccttcttctcttacttccagtttcaaatcttccaaatgcgtatcggcagcaaatgttttaaaggtgtggtcgaaagtcaagattacactatttttgcctgtcaaatcaagtacaggagaaacaagacggctttcagaggcttgattagcgccattaacataggcgcttgccatcatataataagtttcattatagttagacgctttccacacataatcacttccctgcggaagctggacatcctctatggtaaatgcaccttgcccgctctccttgccaaaagactcttcaaggattgtcaccatctcctccggctgttccggcgtctcatctccccccggagtttccgtaaagtccgccacatcatccgcacttcttaccgtaagttgccagcctcctttgaaacgtcccaggataccggttacgcttccttttcctttcggcagctgattggctgcaaagttggcatacgagctggtgcgtatcataatgacattcccatgactgtcctctatgttctcttccccatagtcatcctccggagcaaaagtgccttttccgccattttggaatgttacgccggtaaatttcaccaatttgaacttatagccgttcacatcggcattcaccttgctgatatcatctattacaagcggagtcacattctccggatttgcccaactgtctttcttcacgtgtgcctgaaactcttcccacggtgtacggtaaagatacccgtcggggtgtcccagttgcaactcatcgccatacatggaaaggctcaatcctttcaggtcgatataaaccgtctgccctacgggatagtaattatacacgctgttctggtccacttccatttcgatggcgccggtttcgtcctgcaaataaatcttcttgaagatatttcccgactcgtcattggcagtgataacggctttcatcactttttcctcgccaatggtatagggagcatcctcccctactgttgcccccatagcacgcagttcctctatcgtggtattggctgccggaccatcatacttgggctcgttcaaaggcggcgcatcataatcgcgctcgcaggctgcgaacacaagagaagagataagcaataagctgattctattgaaaagtttcatattcttataatttttctgattatataggattggttaaaaacgataacttacgttgaggaaacaattcagtccctgcatatagtaatacttgccaccaaaacgcgtaggatagctcaggtcggaacggccctgttcatagccgcccgtacatatatctttcttgttcagcaggttgtttaccgaaaggttgaagttgacagactggcgtccgggcagatagaatatcttacccaccgaaatgtccaccgtataagctgccggaaaacgttcctgcgtagtcagtgtacggtaggcctccatctgttccggattgtagggattgacggaagcatagttggacgacaggcggcgcaacggtgcaacctcgatataattgcgggcaaaaccgttgacattggctcccaggaaccagtagttcacaaagtaacgcacaccgaaagtgccggcaaactgcggcattccacccacataaacatctttcatgtacaccttttcctgatccgttatcttaccgttttcggagtgcttcacaccgtcagggttattgctgtaataatattcggaaatggttcctgcaaggtcgaagctccaatggtcgtccaacttgtaggtagcccccagttccagtccgcggtgaatgcggtttacaccgtacaacacgtgattgatgaatgtgccctctatgccgtcgtaataactgttacgctccatctggtcgtagaaattggtttggaaaacaccgatacgtccagccagttggggcatggagaatacatagttgaggtcggcgctgaagatgcgtccgctcttcatgttgtcgattgtgcggtcggtgatacggggtgagatatacgcctcattgggcagcggcgcttcgctgccgtaactgatgttggcggtcagcatatggcgcccgttaaacttataagtgagaccgccctttacggtaatatcggtaaactgatgacggatacccttgccataggaactgtccggatagcgtccgttgcgcatctttccgtcgcggcggaaattggtataagtcagcttggctccatagtagtagtcccagtgccgcgaagtatagcggttcaccgcccaggcatttgccgagtagatgttcagattgaaattgtaaccgaagataccgtccttatacactttacggtccggacggttcaagtcgttctgcaacttgtcgtggtcgcccgaaaaatcgcgttcggcaaacttgtcgatatccagcacatagttgctgcccagcaggtcgtctaccgtcttgaactggcgcgactgcgtaaagcgcgcccctactcccgccgtcaaacccagatgacggttaaactgcttgttcagtgtggagttgaacgaggtctccaacaggtcgctgcggcgctcttccaccatatatacggcagcaccgttaccggcacgcaggttattggcattggccagataaaggttgtcccagtttatctgggtgaaatcgggacgtccgctacgccataagtcacggtactgcatctgcatatcctcgtcttcaaaataagagggcaggtagcgatagtagtcgggacgcgggtcgggagcgttataccagttcagcgccgtattgccatagcgtgcataatgcgcacccacaccagtggtgagcgttgtagtatcgtctatcttccagatatgcgagataacggcggtcgggtcgaatgcggtcactactttcgcattgcgtttcttgccattctggtatccccaattaggattgtaaaggtagttgtcggtcagctcgtagacctcacggtatgagttaccttgctgtccgcgctgtacgggcgatacgaaagcggtcatcgaaaggctgtgcttgccgccctgccactgcttctcggcagagaaagcaagagccaggttgttgtaaaacgtaccgtctatgtttccctcgtgcgaatagcggccacctgccgatgcggtaaacgcccatcctttttcgttgagtccggtggaataggtaaacatgccccgcaggtagtagttacggttggtatagctcacggtagccttgccgccgggagtataggacgatgcacgcatatttatattttcggcaccgcccagtgctccgaaagtaaaggtagagggtgcggtgaagttggttacgtcaccgttgcgggtcatgtcattcaatgctccaacagaggcataattaaacactccgcggttctggtcattaaactccacgccgttgatgtatttcagttcctgcgaaccggtatagccgcgcggcgagaaacgggcgggcgacaactggtaggcggcgcggttcagaaagacatcgttagagaggattacggtggagctcacatcctgcgaagcgttctccacatcgtcatccaccatgcctgcgtctatcacgccaatcatggagatgtcttcggtggcattcagctcggtcaccttaatgggctcgagttctgtaacgcccagtttttccacttcaatggttacactcttcggagtaatcaatacggagttgagctgtatgacatggcttcccggctgcaaattacggagaatgaaattaccgtttgcatcggtagtaacctgtctgtcctgcccggtcagagtgacgatgactccgggtacaggctcattgctcactgctccgactacactgcctttcaccgtacctgcactttgagcaaaggcgagacaggggaagaagaatgtaatgaagaacagtaattttagtttcatacgttaattgggatataataatgaggggttaaaaactattctgataataatgtgtcaaaatctactataggtacacagataaacacaagattaaggaattgattaccatccatatctatattcacctgtatagtctatgataagaagattttgacacactatgcaaaatacaaagaaaaaaagttggattaatcaagctggattaactccatatcatcgtaatagatatagccgcctgcttcatttgtatccgtatttctataaattcttgcctcaaaacgtactttaaccacattttcaggcattgtaatctcaatttttacttgttgccaatcaggattgtcaacagaatattcctcttgctgtatttcggcattcaaatcattaacagttttcccattagcatcaaccagagcaaaccaataacgactgctggctttggcgtcattatctaagaaccaataggacaagcgatatttctttccgcccaaaacctcagcttcctgctgtattttatttgtcttattacctgatgtttgtctcaaagaataatctccactatgttttatagttgcttcctttacaatttcacctgtattataattattatcccatttgataggaagtttctctccccattcttcaaatccagggttaattaaaagattattacccggcgttggttccggttccggctccggttcaacagtgcctccaccttctccatcagctactatcttcacattctttaattcccatgtagcagcagagcttgccgtacttgtatattggaaaccaatctgtatctttttgcctttataagaagacaaatcaatatctccagaaccaataaagttccagtcagttcctgccggataaataaagcctgtaagttcttgccattctccacctacttcttttgcataaactttatggttaaccttaacatcaccagctgctttattaatagcatgttcaaaagtaaacgtaatagttgttgcaccagccaaatccacttccggagaaactaaccaactttctgattcatattttgtcttatccttaaaagcactggctttcatataagcgtattcactaccgctatcggttgtccctttatcaaatttccatatataatccaattcagacggttttgttttatcctcaatggtaaatgctcctatgccgctatcgaacttctcatccaacaacaccttttctccttccggctgctcaccgccaccttcaccaaagtccacattaatatcgccaccaggctggtctgtccacgattcaatgcttgctccgcccatagtaacggcaggtttaccgttttccgtggacaaagtagcagtgtacgtgtacttatatccggcctcaaaaccggcaccgccatttacggaaacaggccattcgaaagtcttaccgtccagcacgaatgtcatcttgacgccatccagtgtagtggtaggcaagataatcgcctcagcagtagtgccatcggcactgacattcatctcgatattggctttactctctttagctgccagcgtaccgtcagccagattaaaatcggcttgtgtattcattccggaaagagagattttcaatccgcttatatcgggaagagtctcatcgctaccgacagcaatcacaatctgactcagtttatgtttgaaagccaggtctacagcctctccggcagcaattgccttagcattatcagaataaagcaagtctactttggcagggtctgcctgattatctacagacacggctaaagtcttaccgtttaaagaggcggaataaggataataagcaatgaaacttgccgttccttcttccggatacctcaatgtctgtcccggagcagccgtaagcgtaccgccgtccgatgcaacatatttcttgttggcaaattcagcagtttgcgtcgtcataaagatacctacttcatcaccattgctccaaacgtctttggaagctttggtctgcaggccgtcaatgcgggaattgaaagtaacgctgttactgtccaaccattcactattgtcatcattgttagtacatcccgtaaaaacaagggctgacaatgcgcccataatcaataaattactgactctcataatgatttgtttttgagattggttttgtttttatgttgtcttaattgagtacctttgtacagtaggattattgccatttggataaatccaattggctctttgtgctctcatcaagtcccgggaagaactcaaatccggtattcttttccaaatcactgacggaaaccgcatatttcatataggattgagaatctgtatagtccctatgttgcatccagaaagcaatcgtatgatacttgccgcctatcttacgcgccacagccttaaaataataggacggaataggaatatccttgccatcattatcctttatagatttttcttttatccaagtagcatcatctgaaggcggtactgcaccggtcacaacataaactgtatccgaagcggtagaccaactattaattctatgttccaaattcatccaaatagctccgttaaatttgtcttgtctttgcggagtctgattggtaaaataaaatgtctgattattcatctccatggtagctacacggtcattactcggtatttgatgtcctcttctataaatcttcccaccataggattttgaaaccacagcttgaaattcattctccctcacaagaggatcagaaacccagttatcctttcgctctacatttttctcagtatagcaccgatgcaaaggataagccacccaatgtgccatcttcatctttttatcatacagcatactataattacgtatcatctgtccttccatatccggtcgggcagtacccttatatttttgctccgtattatgagtaacatacatcaaatcatgattttccatctgtgctttcgttataaccggtgtctcaaaccacttggcatacttaggcgcttcagggtctaccgttgtatttccccctgtattactgattctcaaattaagcgtataccttgctcctgcctcaatatttcccgctatatttgtttcaatctccttatctttcccgttgacggataatgtaattttcagttttccttcaaaggattgcggtatcagcacagcatccgcctgcgtacactctttattgacgcacatggaaacagcttttttttcatttcccaattcaatgttatcactctctttcgaaaggtctatggtagccttgcttatcagtggctgcaccgttgctttgatgcccgttagcgaactgccgtcggcactgctcagattcagcaccagttttgccagcaaatggcggaattgaagattgccggtaggggaggtcgcagttctgcctgtcaggttaacagctgccatcaggtctatatcctgctgacggctctggtctgtcacgtcaaggacatactgggtatggtccgtcacttgctcatcatacggataataagcaatgaaatccaccgccgttccgtcttccggataataaacggcattgcccgcttttcccacgaaattgccgtcaccccgtgcggtgacatacgctgcattggctttaaggacctttttatcggcattgtcgagcataaaaagaccgatcacatcattcgcttcccacgaagcattgaccgctctcgacatcaccctgtcatctatgacagatgtaaatgtggcttccgcagcctgattaccctgcggcaattcagcaaatttactttcacaagcctgaagaacgataaacaaggatagaaatccgattgcacttttaattgtcatactgaaaaatattaaatatcttacaattgtttttattgaactgttttctgtttttttaaaataagtgcataaaattataaaataaaatacacataaataaagacccggaacaaaatctgcatagcatacagtaaaaaagtccttttttaccaaaaatataacaataatatgaaaatataatgtcaaatataaacccttcccattatagacccaacgggaaataaacaagaaaataaaaagaataggataaaaacaacaactatacaggttagaaatatcaagtaaaaaaacagagcatcaataataaaaaatccatttaacaataaagatagcgtcaatcgaaatatctaaaaatgaataacctgtagtttgtttttgaaaagtgaattatttaaaaagaaaatgccgtgagtttgctcctgaaatgccaggcatttcaaacacaaatgccgggcgttttcatgacaaacacacggcatttcgggagtaaactcacggtatttcggaagcaaacccgcggcattccggaaacggaccttgcaggatagtaaaattgcgttttttacgcttcaaaccgatcagtatttatactgactggtattattatatttatatatattatatatatcacgaaggtgtgtcgtaatgcacgatgcaccttctttcttgtttatcaccgatataaatcggtttattttcttcaagctgcgataattcgaagatttctttgatttatgtgtctccagcatctaaataaagcgacagtaagctcataaaaccatcctatcagccagttcataccttcttttgtcagttttgcacacatcttttttatattgaaggcaatggctaggaaggcaaagtccatgaagaccttgtcctttccaaaatgtcggaaacgtttgtagttcatattgtttttaatttgtccgaacacggcttccggttctatgcatctctgccctctgtgtttcagtcctttctctgagcagagcagttctttggctctccgcttgtattgtctaagcctatgattcagttctatcgtcctgtttccttttgctttaaaacagcggcatcgcaggggacagccttcacacctgacagctctgtaccgtgcattttcgctgacatatccggatgcggttttcacattcctggtgcctatcctccgcatcctttgccccataggacagatgcagaagtcatgttcttcattgtagtagaagttttcggccttgaacgggtccggtttgaatctcggccgctgctccatgtggaaatagttgtactttacgtaggcttccatgccgttttcggacatgaagcggtaattctcttcggagccatagccggaatcagcaaccaccgtatgggccatccggtcatacctgtttgaaaaagattgcaggaaaggaatcagggtcagtgtatccgtagggttcgggaagagtgcaaaatcggtgatgaactgattttcggtgccgatttgaaggttgtaaccgggcttcgtctgtccgttgcgcatggcatcctccttcattctcataaaagtagcgtccttgtccgtcttggaataggaattcctctcttgcagtgtttccagatggcagtcgtattcctgcagtttgtccctgtgttcttccagttccttcagctgtttgcgtttctttttcagttcagtcttttcctctttcgcggatggctcggaaacctgttccaatgcatgacgcaattctcctgccatttcagtcagcatggccggagtgaactcaacctcctcattgttctctgatgacttctcccgggcaatgacatcgtctatctgccctaacaggacatgtatcttcttcatcaggcgttcacggttccgctcaaccgtttttcgccagacgaaagtgtacttgttggctttggattcgatctttgtcccgtcaatgtattccacattcaggctgatgaagcctttggaagagagaagaagtacggtttgcgtaaacacctcgttgatttccttcttcacccggttgcggaaacggttgatggtaatgaaatccggtttctcatatccggccagccagatataatggatgtcacggtgaagaagcttttcaattttccggcaggagtagatgttgttcatataggcatacagaatgaccttgagcatcatcttggggtggtaagggctgcggccgcattccttatacagctttctgaaactttcaagattcaagccctcaaccagggcgtcaaccatgcgcaccggatcgttttctgcaatatcctcatcaattctttgaggaaaaagaacggtttggttgggaatgtaaggacgaaaatgtatctttgtcatagtgaaattcttatgcctaaagatacagaatctttaggtaataacaaagccccagcttgtgaaagtcggggctttgtacgtaaaataatgaaggtgtgcattttgacacaccttcaatcacacttcttttcctttcagcgttgccgaactgctttccgtgattttcacattcacaaaatcgcccacgcgatgcgtacccctatcgaaaaccactacccggttctgctcggtacgtccgaagagctggtcgcgcgaacgcttggacactccctccaccaatacttcgtaggttttacccacgcagcgggcgttggcttcggcagaaaggcggttctgcaaagcgataatttcattcagacggcggatcttcacctcttccggcacatcatccggcaaatgcttgctggcatacgtacccggacgctcggaatacttgaacataaaggcggcatcataaccgcattcttccatcagggaaagagaaagccggtggtcttcttccgtctcggaatggaaaccggaaaatatatccgtagacaaaccgcagtcgggaatgatacggcggatagcatctacacgctccagataccattcacgggtatacttacggttcatcagtttcaggatacggctgcttccgctctgcacgggcaggtggatatgcttgcacacattgggcacttccgcaataacctgcagggtttcatcgctcatatccttggggtgcgaagtagtgaagcggatgcgtacgcccggtgcagactctgctacggtgcgcaacagcatagggaaagtgacaacctccccgtccgccttctcaaaacggtacgagttgacattctgccccagcagggtcacttccttatagcctttagccaccaaatccgccacttcattcaagatactttccacatcacggctgcgttcccgtccgcgcgtataggggacgatgcagtaggtacagaagttattgcaaccgcgcatgatggagacaaagccggagatgtggttgccgcagatacgcgaaggtatcacatcgcggtaggtctccgttgtggacagctccacgttaatggctttctcaccggcttccacagccgcaatcaaatcgggcaggctgagataagcatccggccccaccaccaagtcgacatggtggtttgtaatcaggtcgtccttgacacgttccgccatacatcccaacacaccgacaatcagattcttctttttcttcttgagcgaatgaaaaaactccagccggtttaaaattttctgttcggcattgtcgcggatagaacaggtattcatgaataccgcatccgcctcttccagtgtatcggctaccgaataccccgccatctgcatcacagaggctatcacttcactgtctgccacattcatctggcagccgtacgtctcgatgaacaactttctgttgtcatcagcagttgcagatttaaagtctgctcccgtcatattttccattgtttcttatttttttagtttcgccgcaaagatacatcttcacgttcaataaagcagtgaaactgtggaaaaataacacttaacttcctctaattgacagatttctactaattaatgttaagtgactaaacattttccgagtgttaatttggcattattagaataaatttccatttttgtgaaatgaaagaaacattagattttttcatagttaaggtttaggttaaaaaaaataaggggagctgtgaagctgcccttttttaatgccaatttattggttacaatcagattaaataattacctttggcgatgtaaaaaacaaagaaagacttatggaagacatcttcaaatttctgttcgtgataggcatcattgctatcggcttcgtaagacaggccaggaaagaagcgaaaaccagtaccggcaacggtcccgccatgcctatgcctgatgcagaaagtccttttccggaaaattggaacggcgtaccctatgacggatataaccccgaaaaccccggaccggaagtaagcgcgccgcgaaagaaagccgcaaagaaacataagtccgctcccaaacaacctcccgtctgtccaaacaccgacaatatgtctcccgaacccaccgaggcctcatcccaatttgaaatacactcggcagaagaggcacgcaaagccatcatctggggagagatattacaacgaaagtattaatgcgattgaaaataagttgattccttacacgaaaaaataactataacattatggcatttaattacatttcagcagcagaagctgcaagcctgattaaacatggctacaatatcggcctgagcggatttactcccgcaggcacagccaaagccgttacggctgaactggcaaaaatagcagaagcggaacatgccaaaggaaaccctttccaggtaggcatttttacaggagcttcaaccggcgactcctgtgacggtgtcctctcacgcgtcaaagccatccgctaccgtgctccttacacaaccaaccccgatttccgcaaagcggtgaacaacggcgagattgcctacaatgatatccatttgtcgcaaatggcgcaagaagtacgctacggtttcatgggaaaagtaaatgtcgccatcatcgaagcctgcgaggtgactcccgacggtaaaatctacctgactgctgccggaggtatcgctcccactatctgctgccttgccgaccagattatcatagagctgaatgcagcacacagcaaaaacgccatgggcctgcacgacgtctacgaaccgctcgacccgccttaccgccgcgaaatacctatcttcaagccgagcgaccgtatcggacagccttacatccaggtagacccgaaaaagattgtgggcatcgtggaaaccaactggccggacgaagcccgctctttcgccgctgccgacccgctgaccgacaaaatcggacagaacgtagccgacttccttgccgcagatatgaaacgcggtatcatcccttccaccttcctcccgttacagtcgggcgtaggcaacatcgccaacgcagtattaggtgctttgggacgtgacaagacgattccggcattcgagatgtacacagaggttatccagaactccgttatcggactgattcgcgaaggccgcgtgaagtttggcagcgcctgctcactgaccgtaaccaacgactgcctgaacggtatatacgaggatatggacttcttccgcgacaagctggttctccgcccgtcggaaatatccaacagtcccgaagtggtgcgccgtttaggtattatctccatcaacacggccatcgaagccgacctctacggaaacgtaaactccacccatatcggcggtacgaagatgatgaacggtatcggcggttcgggcgactttacgcgcaacgcctacatctccatcttcacctgcccgtccgtagccaaagaaggcaaaatcagcgccatcgtaccgatggtatcccatgtggaccacagcgagcatgatgtcaacatcatcgttaccgaacaaggtgttgccgacctgcgcggcaagagcccgaaagaacgtgcacaggcaatcatcgagaactgtgttcatccggactacaagaatatcctgtgggattatctgaaactgaccgacggcaaagcgcagactcctcattccatgcgtgccgctctggctatgcacgccgaactggcaaaaagcggggatatgaagaatgtggactgggcacagtataaataaagacagttccttccgttaaaaagacctttcaggcacgggattacgcggattgcacggatgaaaagtgcagcatggattaaactgaaaaaatccgtgcaacctgcgtaattccgtgcctgaaaaataaagttcacaccaaccggccattcatcggataagcatgtcacagactgcatcctggaatttacgcgcctccctgccggaaagcacattctgattcataatggcaaaagcaatgtggtgtccgttattcgccttcaaataaccagccaggcagtttatagccgtaaaagaaccggtcttggcatgcacattcttataagaaagcgtccctttcctcatacggttcttcagtgttccgtccactcctccgataggcaacgccttatacagtttctgaaacacatccgtgcgtgaataagcgaatttcaagaaagcgactaaaagttcagaggagatgtagttatagttggaaagcccgcaaccgtctgccagattatagcggtcggggagataacccagctttccgattaactgacggacagccgaaagcccgtccgcagccgaaacatgcctgccgcccgtaaactgtgcacccaaacggcataacaaagcttctgcattcagattgtcgctctccttcattatccggttgactaccgcctgtacagaagtgctataagatgccattcgcactgaaacactgtctttttgaaactcgcggaaagaataatccgacagacaatgaatgccttttgcccgtaaacgctccaggaaggtgtgcataaagaaatcctgagaagagtagatattcaccgtaccggtacgcctcccatccacattacccgataccgccagttcattgccgttctccagccagttgcgggatacgcggaaacgtccggcagagggagtacgggttttcgttgtattggccagcgtgtaataagacgaagcgggcgtacattccaaacgtgccgcatcaccttgtgcaccgggaaaagcggtcaccgtaaccactcctttatcgagcatcagcggcgacaggtacggctgaaaagaatggggcgtatcgtcccacagccagccgcttccccaatacagggagtctttcatggaaacatcgccatatatcctgccttgaaccacagagaaaggcagccgcgccacgctgcctaccaaagaatccagcgcctcgtcgtcaaactcagggtcgaagccgccgacaacgtatatatcccctttcagcgtatcacgctcaatcactcccttataccagacttccgtacggaaaggctcgtccgcctcaggacgcgcaagcgccgtaatcgtagtcagcagcttcatcgtagaggccggacgggaaagtttatccgcctgataatcatacagaaccttattggcggtcaggtcgtatgctgaaacagatacattggagcctgcgggcaattgatactttatcaatgtatccagttgcgaagacaaagagtttgtttcaggtgatattccctgtgcaggcaatacacagggaatcaacgtcaaaatcaatacaatcgggaataagcaatattttctcatcttcttacaagctatcattcagtttctctgttatccggctgtttccggcaaccggacaacaaagaaacgataaccgccgcagaatcgcaagtcatcagcttcacgattttcataacaccccgtattttgtctatcaaagcgcttccttaaagatttcgcctaccgtaggatgcgggaataccatctttttccattccgaggccgtcagtttgagttcgacagccataccggccagcgtgataatctccgaagccggattgcccagcacatgtgctcccaaaacggtattatcttccgccagcaacaacttgcacataccgttaatgccctcattctccgcgacaaagcgaccggaataagccataggcagcttgacggcacgataaggaataccctttctttgcaaggcctcttccgtatctcccacacccgcaatctcaggattggtatatactacaccgggaatagccctgtaactcatacagtctttcttccccagtacggcatgtaccgccacttccgcctcgcgcacagcggtatgggccagcaaagaaaatccggttaaatccccgcaggcatatacccccggaacggaagtctgcatctgtccgtccacctgtatatttccgcgcgccgttttatctaaattcaggttctccaatccgaagcctttcgttacgggacggcggccgacgctcatcaataatctttccgcaattacacaacccgcaccttcggcattttcataatttacctgtatctgctgcgtgtctccatttccggacgcaacttcggacagtgccaccacctttgtgtccagcatgaatttaatgccgcgcttggcatactccgcacgaagcatggccgacagctccttgtccattccacccaatatctcgtccagcatctcgatgacagtgacctctacccccaggctgttgaagaatgaggcaaactccataccgattaccccaccaccgataatggccagtgactttggaagctccttattgtccaacgcatcgcgatgcgtccagtaaggcaccgtatccactccgggaatgggcggaataaatgtttccgaacctgtgcagagcaatagattatcgcattcataagtttcgtcaccgcacagaacatgattcttatctatgacggaagcctcgccggtcacaatggttacattgccggcagtcagttttcctttgacacccaacaccagtttccgcacaaccttctgcttgcgtgctataatcttggacaaatcaaacgaaacttccgacacgctgaccgcgtatttggatgcgtggcatgcattgtcatacgtttttgcagagtacaataaagtcttggtaggaatacacccctcgttcagacacactccgccaagattccgcttttcaaaaagcacaacactcaaaccggcctttccggctgtttccgcagccgtatatcccgcaggaccgccgccgataatggcaacttgatatttcatagttcttacatttatggatttctgcatgcaagatacgacaagaaattcagaaaaaaaagcgtaatgccttacataattatcatcttattgcgacatacgctgctcaagcaggcggataaactcttcctctttgacgggaagaagcgctgcacacttaccctcgccatacctcaccaggacatagcgcataacggcaaatccgcctatctgcatggaggaagcgcgctctaccgacgtaatatccttcagcaggatttccttcccccgtgaaaaccggccgaaaaacagcaacagtttattgtcggcagtaacggtataggtagtatgaatcaacttctcgatactgacaaccagcagaagcataaaaaggacagcgatgagaatttgcttttcccaaaggccgtaaacggctattacacctgccaaagcaacaaacaaatactgtccggcagcgatacgcgcatgaaaaattcgattcattttatccggtttttgccgctaaggtaggtatttttacgaattaatgcccataagggagacaaggaacgtacttattttgtagttttgcggtgttaaatacacgaaactatggtaagaaagttcgatttcctcgttatcggctccggaattgccggtatgagttttgcgctgaaagtggcgcataaaggaacagtagccctcatctgcaaggccggcctggaagaggcaaacacttatttcgcacaaggcgggatagcctccgtcaccaacctggcggtagacaatttcgacaagcatatcgaagacaccatgattgccggagactggataagcgaccgtgcagccgtagaaaaggtagtgcgcaatgctccaggacaaatcagtgaactcattaaatggggagtgaatttcgacaaaaaagataacggagaattcgacctgcacaaggaaggcggacactcggaattccgcatcctgcaccacaaggacaatacgggtgcggagatacaggaaagcctgattgaagccgtgaagcagcaccccaacatcaccgtatttaccaatttctttgcggtggaaatcattacgcagcaccacttgggcattatcgtcacccgctatactccgggcatcaaatgctatggcgcctatgtgctgaacgaaaataccggagaggtggatacgttcctctccaaagtaaccatcatggctacgggcggttgcgaagctgtataccgcaacaccaccaacccgctggtggccacgggcgacggcatcgccatggtctaccgcgccaaaggcgccgtgaaggacatggagtttatccagttccaccccaccgccctctatcatccgggcgaccgcccctgcttcctgataacggaagccatgcgcggctacggcggcgtgctccgtaccatggacggcaaggaattcatgcagaagtacgacccgcgtctttcactcgccccgcgcgacatcgtggcacgtgccatcgacaacgagatgaagcagcgcggcgacgagcatgtgtatctggatgtcacccacaaagaccccgaagaaaccaagaaacacttcccgaatatctataagaaatgcctcagcataggcatcgacattacgaaagactacattccggtagcccctgcggcacactatctctgcggcggtatcaaggtagacctggacggacagtccagcatccgccgcctgtatgccatcggcgaatgctcttgcaccggtcttcacggaggcaaccgcctggcttccaactcattgattgaagcggtagtttatgccgatgcagccgccaagcatgcgttgagcgtattggaacgttatgatttcaacgaagacatccccgaatggaacgacgagggcaccatctccaacgaagagcgtgtgctcattacgcaaagcatgaaggaagtgaaccagattatggaatcctacgtaggcatcgtccgcagcaacacccgcctgacccgcgcatggaaccgcctggatattctttacgaggagacggaaaaactgttcaagagcagcaaggccacccgcgagctttgcgaactgcgcaacatgattaacgtaggatacctgattacccgccaggccatggagcgcaaggaaagccgcggactgcactatacgatagactatccgcatccgcagaaataaacggttatggcacacttcaacgagtatctgaactttttggaactttctcctttgattaaacatttcctgcaaaacgggaaaaaacgtctttacaagaaaggagagttcttttgtcaggcaagtgaagtgtgccataacattgcctatatctcccaaggaggtttccgttacttctaccttgatacggaagaagacaaacatatcattggctacagttttgaaaaggattttgtggtagactatgagtcattcacaaaacagacacccgccattgtttatacggaagcaatcaaggcgagtaccgtctatcaattatcttataaccaattggaagcattttgggcagcaagccagcaaaaccagttattaggccgtaagattgcagaaaacctgttctgtatgacttatcaccggctattgagtctatatccgaattctcctagaatacgctatcaagaattattgagaagatgtcccgacatcgttcaccagataagtctgaaggaaatcgcttctttcttgaatatctctccatataccttaagccgcatccgacgggaaataactttcggataaaaagattaatttcttgcttcaaggcaagaaattgcaattttaatatatttatttttgtcaaaatattacaaactgctatctttgtaaatacctattatctaatcttatagcagactgacatgaaaagcagttgtatctatacatgtatacttttgtgcttgtacgtttgcaacttacacggacaaacacttgatgacaacattgtcattacacaatgcagcgactcctatatctttatggaagaagacggtattcctaccgtacgcaacagaaaagaaacatcctatgaagccacaagaatgggaactgcattgcaaccctacacctactacggagaattcatttcattggacggagcttccgccaaaggcggaggaaaggcagaatataaaagcatcacgccggaaaatgtcttcttcgacgacagcaaggtttgcttcttcaacatcaatcttgaccgtaaaggaaaaaagacggaagttacgtttaaacgtacttttcatgacctgcattattttacacgaatctatttgggtgaggattattttataaaaacaaagcaaataacattcatcattccgcaatccctctcccatttccggttgacagaaaggaattttactccttctattcactgtgaacgcggcatcaacagtgccggagactccttattcacttataccgtgacggacatgccggccatgaaagacgaaaaacatatgccggcatcgggtaaaatatacccgcacatactgataaccggctcatttaaagatgttcacgatatgtaccggtggtctaacggactggcacaagtagactgcaacatacccgaactcgacagtctattagcagaaatcaccgaaggctgccgtacggacatggaaaaaatacgtaacacatatgcctgggtacaacaaaatatccgttatatcgcttttgaagcaggtatattgggacacaaacccgatactcccgcagaagtgttgcgtaaacggtacggcgactgcaaaggaatggcaatcttgctccgtacattgctgaaagcacaaggttttgatgctcgccttaccgatataggcactgtagacatcccctaccggatgagcgaaatagctacacttgcatccgtcaatcacatgatatgcagccttatctaccagggaaagacctattatctggatgccaccaacgaatatataaacgcggaattcatacccgaaagcatacaaggaagggaagctgtaatagaaaatggagaaaactgtatcgtgcacacattgcccatgctgaacagcagtgcatctacagacagtttgtcctatatctgtagcctatccgacaagcaaacgaacaaagtattgcagggcaatgtaacccgtagctggagtggagacatgaaagaatttttcctcacagcctaccatgaaaacgataaaagcggtcggaaagagtatcttccccgtatcctgaccggagataatcacaattatcagattaattcggtcagttggatacagcaggaacctcaacaggaatgggctgctctgaccggagaagtaataaacagcagtgctgtacaaatagccgataatgagttttacatagagctggaccttcacaatgacctgtttgaccaaccgatagacaccgccaaacgcatccatgattacgagctcccgctccgttgccgcatcgtacgccacacagaactggaaatacccgcaggctacgtactttcttattgccccaaaggcatctcaatccatacgccgcaaggtatactctgttgctcttacaaaacagaaagaaacaaaatcattttccggaaaataatggagataaccgaaaaacgtattccccgcaacgaaattacaatctggaatacacacttgcggaaatgggctgatgcatcccacgaacaaatcatcctcaaaaaacaataataatgaaacagaacatgttattcctgatgggggtgttggcacttttattaaccacccctaatgccaatgccgatgacaaagagaaatacaaactctttgcagaggaaacgagaaaagaagtctgggcattgaaactgcccgaatttaccaacacggctgttcccgataaatataaagatgagtcagccgtcattctggcagcacacagccggttggaaatcaccaaaaagacccgcttcaacgtcggcgccttcctcggaggatttcattatatcgaccgtgaagtaaattgtcgcgacttatatcgtatgcttgtgcaaattaacgataaagccgctttgaaagagtactccgaatttgattataaagcggaaatacgtaaaaaagactggcggtacgacgaaaactaccagcaagtactgggcgtacgcatcatcaaaccagacggtaccgtaaacgaagtaagcaccgacgaatacatgacagccaccgaaggtaagaaagaccaggaacaacttcagaaacttgccgtacccggactggaaatcggtgataagatagatattttcttcttcaactacacttcattggaaaaccacaatctcgacccattcgtcttccggtttcgccaaagccacccgatgctttcctatacagtacattgcgagatagatgacaaacttactacccagtaccgtactctgaacggtgcaccggactttaaacaaagcaaagacgaaaacggaaacatcctgcttgatgtggctgtaaaggatatagaacaaaccgaacccgacttatggtataaccctatgcagcaaactccaatgacattgatgtacattaccaatagcaagatgaaaaaatacacctatattccaaaaagcaccacagaaaaaggactacaacccaatcctgatgcggctgccatacaggaagacgactgggaatttataaagcaagctcaaaaatatagcggatatggcggtttaagtagccccaagaaaggtatccggcttctccgcaacgtaaagcaaataaagaaaaaagactggacagacgaaaaaaaagcagatttcatctacaattactatcgttttgcattgttatcggacattaaaagtgattgcaacaacgagctgttcatcatctattttcagggattgctggattgggtggatgttcccaatctgtttggaatggttaccaacgaagacaaagaaccgcttgacaaactgacgaattaccgcaataccacctggcttcttgcacttcctgaaagtcagaaatactatctcccgcctacagcctaccttattccccatgaaattcctgcccgctatcaaggcagacaggccatcctggaaccggataagaagaaagccaagaagctgaatacaaaggccgagcgggaacatttcaatctgccggcaggtacagccgatgataaccaaaacatcactaccatacaggccgacatcgacaatacgctgctcaccgtcagccggaacgaataccgcaccggaacacaaaaagaatacatgcagtctgcattggttaagctggaagatgtggatgcagcctatcggcgcctgcttagcattgataaggagtttgccgaagaagtaggcaagaaatacgcggatgatcttcgagaagcattccgaaagggccgcgaacaggaaaaggaagattataaatgggaaatagacttctaccacggcgaaaatgccaaagagttgctcggctatcagatgcaatgtttgggtaatcgtccggacagcgcagcctttatttataacgttcgttatacaatggatggctatatccgaaaagcaggacctaattacgtgctttccgcaggcagactcataggtgaacagacgcagattgaaggtaaggaacgtaaacgctccgccgacatttatatgtccgctccccgcactttccaatggaatatcactgtaaatcttccggaagggtacaaagcggctcccgaaggagtagagaagttaaatgtaaaagtagaaaacgaatgtggtgctttcattgcaaaagctgttacagaaaacggcaaacttatattgaatatcctcaaacgatataatcataagatagaaccggctgccaattgggaaaaactgcttcagattcaagatgcttccaaagcctatgaagcgctttccgtagtactaaagaaataatattacagataaaaagcggccgaaaaccggtcgccgaatgaaccggaatcaaggcgcggattatacgaatataacagacaaaatattctgtatgccttcgtataatccgcgcctgaatccagtattcggacagatgtaccgactatcaatagttttccttcttcacctcgaaataagcctgcggatgcaaacaagccggacatacctgaggagcttccttgcctgtgtagatgaaaccgcagttacggcactgccatactacttcgccttccttagcgaaaacagtagcattttcaatgttctgtacaaaagcgcggtagcgttcttcgtgtcctttctctgcaatggaaatattacggtacatggcggcaatttcaggaaagccttcctgctcggcaacatcggcaaagtgaggatagtccaacgcccactcttcatgttcgcctgcagcggcagcctgtaaattctccagtgtagtgccgataactcctgcaggataagaggcggtgatttctaccataccgccttccagaaacttaaacatacgtttcgcatgttctttctcctgatcggctgtttcggtaaagatagcggagatttgctcgtaaccctctttctttgccacgcttgcaaaataagtgtagcgcattcttgcttgtgattcaccggcgaatgaagtcaacagatttttttctgtctgagttcctttgatactcttgctcataattcttttttattagttaatgtaattacgtatagatagattgttcgtatttcctttatttacaagacaaaaatacgaatttagttttaataaaaccccactttgcctcattggatttatctaccgcctaataggtaaaatctatttcgttccataaatccaatgaagctattttttatttctgattaacctcaaatccgcaactacgcgcctaatatgatacagaagcgaaaagaatctgcatcgttagtaaaaagggggcacagtgcatcgaatgtcaccataaagacatataaatgccccttaccccaccatgcgacttgaggcaatacgcaaaatcacgactataagttgtcggtgttatccaaagtcattctggaacacattggcataagcattgttgcatgaatagatattcagcacatacttccttgatgtcctgacccatttggctggcacagagatgaacttaaagacaaacgtcttgatgcggcttgttgctttgagtccgaacctcttcacgtcaagcctcgccatgatgaatttatagaagttgcgtatgagtgccataagcagaagaaacaccgtgttttctcccataaaggattttggaagcctgttccagccgaatccgttattcatatcatcgaagatgcgttccttccctccacggaggttatagaattcgacaatctctttctcggaagactcgtagtcatttgtaaggatgcagcggtaggtgtattctccttcccacaggtcgagttcgccgtctatccgcttctgtctttgaatcacaagacggtatgccttccctttccatttctcgatgagaatggaggccagctcaaactcaatgccgcccaattccactttcttccaacctctgagggcaaagatgtcattgtagagcgaactgcatcggttagcacggatatagaaggtcttgcagtgtttagcaatctcttccactatctcttcagaacacgagccgcaatcagctctgaaacggttgataataagcttgttttgttcaaacctttcaaagaacctcttcagcgtgtccttctggtggaaacggacatttgtgttgccgtcgctgttctcaatgccgacaatcaagttgccaataaccgccacgccagggcgataaccaaggaacttcttgtatgtaggcttcgcatcaaacttctcagcctctatgaactggtggtcgaagtcaacgtcatacccctcgccctctttcagctgccctgtggacaataggcaattgaggagcagtgtattcagcttgtctgccgtgttgaagtcgtaggtcttgccagtgtcggatgtgtaggaaatgttatcctgggtcagttcctttatggctctaagaatcgtgtcggcactgcatgtgcgaagtgtcggatgaagcgaaaggtggtacatcagatgagtggtgacatcctcgatgcatgagccgccacaaaaataaacgctcataagcgaacggatgatttcgctgtattgataaccatacagcctgcatctcataccgagggttgagtcgattacagatgagagtctggagtcaaattgctccattattgaaaatattcctccaaaaggagtgagtttctcggatttaattgctacctttgccatgtctgtcgggtttgatacatattttgatttgcaacactaagataggtgaaaaatctgacatggcaaattcctgagcaactttttgttgctcaggtacttaaaaagttatatttgtaatagtgttgcggaattaaggattaataacaagcagtctgatgttaataacaagaaacaccttgtttatgttcaagcacccacaaaaaacaatcagtcatcgtgcccgaaacggtgcataaaaacaaaaagagcggaataattatagctgtttgcattattttacctaattttgcaatctcttttcaaaaaaagagaacgtatcgaaatcggatcggtgcatcctcacaggtaaaacaaagtttctaaaataaaatgaaagcgttcgaattcaagccaaagctatacacggctttaaaaaattactcgaaagaactcttcatggcagacctgatggccggtatcattgtgggtatcgttgccttgccgcttgccattgcgttcggtattgcatcaggcgtatcgcccgagaaaggtattatcacggcaatcatcgccggttttatcatctccctgttaggaggaagtaaagttcagatcggcggccctaccggtgcgttcatcgtcattatctacggcattatccagcaatacggagaggccgggctgattgtcgccacactgatggcgggtgtcatcctcattcttctgggagtattcaaactgggggcagtcattaagtttatcccctatcctattatcgtaggctttacaagcggtatcgccgttactatcttcaccacccagattgcggatgtattcggattgaatttcggcggagagaaagttccgggagacttcatcgggaaatggctggtttatttccgtcatttcgataccgtcaactggtggaatacggctgtcagcatcgccagcatcgttatcattgccatcactccgaagttctcgaagaagattcccggctcgctcatcgccattatcgtagtgaccgtagccgtgtacctgatgaagatgtatggcggcatcgactgcatcgacactatcggcgaccgtttcagcatcaaagccgaactgcccgatgccgtaatgcccgcgctgaactgggaagcgattaagaatctgtttcccgttgccatcacgattgccgtactgggagcgatagaatccttgctgtccgccaccgtagccgatggtgttatcggcgacaagcacgactccaataccgaactgatagcccagggcgttgccaatatggctactccccttttcggcggtatccccgctacgggcgccattgcccgcacaatggcgaatatcaacaacggcggcaaatcgcccgtggccggtatagtacatgcagtggtgctgctcctgattcttctgctgctgatgccgctggcgcaatacattccgatgggctgcctggcaggcgtactggtggttgtgtcctataatatgagtggctggcgcgtgttcaaggcattgttgaagaacccgaaatcggacgttaccgtgttactgataaccttcttcctgacggttatcttcgaccttacagttgccatcgaagtgggtctggtcatcgcctgcgtgctcttcatgcgccgtgtaatggagacgaccgaaatttcggttatcaaggatgaaatagacccgaacgccgaaacggacatcacaacgaacgaagagcatcttattattccgaaaggcgtagaggtgtacgaaatcaacggcccttacttcttcggcattgcaacgaagttcgaggaagtgatggcacagctcggcgaccgccccaaagtacgcatcatccgtatgcgcaaggttcctttcatcgactccacgggtatccataacctagaaagcctttgcaaaatgtctcagaaagaaaagataaccgtcgtgctctccggcgtaaacacaaaggtacatcaggtattggaaaaggcggatttctacacgcttttaggcaaagagaatatctgccccaacatcaacgtggcactggaacgggcacacaaactggttgaatgacccggcaattgcaaaccgcctctctttaataacaggaaaagaaaaccgtatcgtcatggcaaaaagaaaaagcagcaagaagcaatctcaaggagtgatttacctgatagtgctggcatgtctggcactcatctgccgtgaaccgatagcccgtgcgctgcaagacaagcttcctgtaattaaagagaggataacgcaaaaagcaacacccgccatcaccggaagccccctgcttcccgctcccctgaaaaacgtacccgaacagatattgcaccgcaagggctataccacttcgtacaaccgcgaacataagatacccaactgggtggcatgggaactgacacccgaaaaactgatagagcgggaaagccgtaccgacaaattcctgcccgaccccgacctgcccgaaagccaagctgtgactaccgacgattataaacgctccggcatggaccgcggacacatgtgccctgccggcgacaaccgctggcactggaaagccatgcaggaaagtttctacatgaccaacatctgcccccaaaaccacaatctgaaccggggcgactggaaagaactggaagatgcctgccgcctgtggacaaaaaaagaaggaaagctatacatcgtatgcggtccgattctttaccggcaaaaacaccgtaccataggcaggaaacacaaagttaccgtgcccgaagctttcttcaaagtcatactcagtacccgcaacgggcatcctaaagccattggctttatctttaaaaatttatcaggaaatcatccgttaaaaaactatgtcaacagcgtggatgaagtggaacgcatcactggcattgacttttttcctgctctgccggatgatgttgagaaaaaggttgaagccatgcaagatttaaatttatggagctttcgctaactgttaaccttttttaagcttacaaatttaaacaacataatatcattgtatgtagcatatattatacatacaactccctctgtatttatcaaaatgtaatagtaaaagcgtttaaacgatattttactttatatttatataatatatcgtttctatatacttacattttatcaccttattattttctttttttcaaaccttattattattaatttaatatctttgcgccccgataataacaggcttaattttaacaaaataaaatgaatttgtatacagtgtcaaaaagaatttttgtttggagaaacataaaaaagcgtgatgacacttaatttttagataattactttctgaaattctacaacattaggcatttatcaattcaattttaatcaataataatttaaagacaaggatgagaaaatcaattctttggtttgtacttttaacattattcgagattccttatgtgcttgcacaaaatggatttcgggtgacgggacaaatcatctcggctgatgacaatcaaccggttattggtgtgtccattatagaaaaaggtacaacaaatggtgtaattaccgatgttgacggtaattatagtattatggtgacaaaatcacctacgagtttacagttttcttatattggtatgaaaactgtagaaaaagagtttacggctgccacccgctttgatttgaagatggaatccagtgcggaaatggtagatgaagtggtagttgtggcttacggtgtgcgtaagaaaggaacaacaacaggttcaatgtcggttgtaaaagacaaaatcatggaagctgttcctactccaagtttcgaccaggcactgcaaggacaagcttcaggattacaggttttgtccagcagcggtgaacccggtgccgtagctaatttcaaaatccgcggtatcaactctatcaatgctggtacagaacctttatttatcctggacggagtagccgtttcgtcagaagacttttcagctatcaaccccagtgatatagaaagcgtatcggtattgaaagatgcctcctccacttccatctatggagcacgtgcagccaacggtgtaattgtgattaccaccaaacgcggacgtgtaggagataacggtaagattgcagtacgtgcacaatacggtgtatcttcacttgcctatggcaaatgggacgtaatgaatacgaccgaacgacttaactatgaagaagaaataggattgcgtaaggcgggttcatacgaccgtgaactgctggaacgcacaaacatagactggcgtgatgtagtatataacgatgctgcaagtttctacagcaccgaaatccaaacaagcggagctacgcaaggcggatttaactacttcatctcaggaaatatattttcgcaagacggtatcgccgttgggtccagctacgaccgttatactttccgtgccaacctggaagctaaaatcaacaattggttcaaagtaggaagcaacgccactttcgcatacgaaaaaataagcgaagctcaggaaggagagtacacaacctctactcctatttccgcgtcacgcctgatgcttccctactggaacccttataaagaagacggaagctgggcttctgccgccgacggaagttggactggttccaatgttaaccctatggagtggcagacaactaactggaacgatacgaacaaatggaaagtcattgccacggcttttgccgaactgcgtccgctccccggtttaacgctccgtacattgggaggtatagacttcctggatatgagaagcaacaacgaaacttctcccgactttgtcggcaaccagggtgaaggtgccattggccgcggtttctcccgtgcaacgaaccttacctggaccaataccatctcttatttgttcgacatcaaagacgatcatcacttcaatgtgctattgggacaggaagctgtggataaccaatctgacgctttctccgtaataggccgcggacagacaaactcttatcttgtgaacctgtctgctgcaacccgtgccgatattcctaccgattcaagaagcggcagtacttacctctctttcttcggtcgtgcggaatataactatttaggtaaatacttcgttgacctcagcgcacgccgggatgcatcttcacgtttcggtaccaattcgcgttgggccaacttctggtcggtaggtacaatgtggaatgcaaaagccgaaagcttcttggaaaatgtatcttggctggacaacgcacagctacttgccagcatcggtacatccggtaactcttccatccccgactatgatcatctggcattagtggcaggcggtcctatctacggactcgaaggccaggttcttccgggtcttgctccttactccaaaggaaacgaagacttaacttgggaaaagaccactatcctgaacatcaccatgaaattgggattcctgaacagatttaacctgactgcggaattctataacaaatatacctcggacatgctgatggctgttcccgtttccgtagtaggcggatactccacccgctggagcaacatgggtgccatggttaaccgcggtgtagacctggacttgaatgtaaatgtgctgaaattcaaagatttcctttggactgtttcagccaacgcatcttacaacaaaaatgaaatcaaggaactctatgagggtcgcgatgaatacgaactctctaccaccggtctgttcctgaaaaaaggacactctttcggtgagttctacaccaaccgtttcgctggagtcaaccccgccaatggtgatgctttgtggtacgacaaaaacggtaacctcaccaacgaatgtctggacgaagacaaagtgctggtaggtaaaagctatatcgctccctggcagggcggtttcggtacatccctttcctggaaaggacttaccgtatctactcagttcagttgggtggccgaccgttggatgatgaacaacgaccgctatttcaatgaaagcaacggtacgttcgtcaactataaccagtcgaagaaaatgctttacgaccgctggaagaaaccgggcgacgtagccacagttcctcgttacggcatcgccgcacagttggacagccgtttcttggaagacgcgtctttcttgcgttggaaaaacctgatggtttcttatacattgcccgccaacctgcttgctccgttgaaagtagttgagaatatccgcgtatatgcacaaggacaaaatctacttacattcacgaagttccagggcatggacccggaatcgagcatgaacatctatgcggcgcaatatccgatgtctcgccagttctccataggacttgagataggtttttaatgtgtaataaattatataacagcatatatatgaaaaaaataaaaatagcatcgctttgcttcctgtttgctttgggagcgacatcgtgcagtgattttctggaccgctatccggactcggctattccggaaaaagacgccatgaagacattggacgattgcagcgaagttgtgaccggtatttatagcgcgtttaaaaacggtgcgctttatagtggtcctttgactatcctgcccgatattcaggcagatatggcatatgcttcttccaccaacatgggacagtatacggctgcctaccgctgggaaataaaacccaacgatactgacgtggaaagcatttatgtaggactttaccagattgtagcccgctgcaacttctttctggactacaaagaccaagtgtatgaaacactgacgaaagaagaagataaaaagactttcgaaaagcgtttgggtgatgtatattttgcccgtgcgctggcttttgccgatttaatccgtactttctgtgaggcatatacggaagaaaacaaagatactccggatatgggtatctcacttccgatgacgtatgccgaagcggttcccaaggtaaagcgttccacactgtacgaatcttacaaacaagtactggacgacctggaacaagccgagaaatatataccggccgaacgttcggttgccgactctccctacttcagtatcggtgccgttaatgcgctccgtgcacgtgtctgcctatatatgctcgactatgaaggtgccgtgaaagcagctaccaaagttatcggaagcaaaatctatacattggccgatgccactactccctatgctactgtaggcgatactcagatatccgaatatcaatatatgtggagatatgatgaagccgatgaaatcatctggaaagtagccatgtcatccgacagctatggaggaagcctgggcaatgtgttccttaactataacggagctacttacaacccgcaatatatcttctccgagcaaattctgaatttatatgaaagcaacgacttccgtacgagcgtattctgtgcgcaacaggaaaattcggccggaaacactgtttacatgattgtaaaatatccgggcaacccgaatttggatggtggtctgcagcagaatttcatcaacatgccgaaacctctccgcctttcggaagtatatctgattcgcgccgaagcttattacaatttaggaaaagctacggaagcttcccaagaccttacagcactgaaacgcaaacgttatcagtcgttcggcagctttagtgctgaaggtgaagacctcattaaggaaatccgcaacgaacgcatacgcgaattatacatggaaggtttccgtctttcggacatgaagcgctggggacttgacttggtacgcaaaaaacagctttatacaatggacggaccgagcaacaatgaactgaaacgtacgaaagaccatccgctctttacatggcctatccccaaaaatgagattgaggctaccaacggagtggtaaaaggcaatagaagtaatggaagtaataattaacaataaaacccgattagcaaaaatgaagaaacttttaaaagttctatgggcattgcctttaacggcactgctggctgtaggttgccagtcggaagacgtggtgtacaacggcggagactacgtaatgttctccgactctgtctataccatgcctgtattggaagacgacaaggtgtttgaagtacccgtatcggctaccaatgccacagactatgaccgcaactatgctgtagaaatcatcaatgagaaatctacagccatacgcggctatcatttcgattttgtagatggcaccaataatatcactatcaaagccggtgaacgtgtgggtatagtaaaactgaaaccgacatacgccaatgtagctcgtgaagacagcctggttattagcctgcgattgttggaaccgaaagacgaagaactcgacctgtacggtaatgtaacgcgtgtggatatgcagaaatgctatcctttcagtatggataatttcatgtatccgggcgcttacacatatatgctcgcttctttcccgttcggtgaccaattgcagcagatacgtgtggatgccgaagtggtggatgaccatacaatcaaattaaagaacgctttcagcgacctgtatcccatccgactcattttcgatgacagcgacccgctgaattatgtcattaacgtacctgaacaggaagcgtttaaagacagcaattacggtaccatttatttacgctctgtagagatgtatccttcgtacttcaatgtacccgaccgtttctttattctttatctggaaatgtatatcccgcaagtaggtagttttggcgtataccaatacatcttcaaatgcatcaccaaagaagaagcctgggaaatggacaacggtgaaatcaatacaggaggttctattttgagcctcagagcactatctgaaaactaaaataacacagtatgaaaactacatttttttatttaaaagcaatgtttgccgcatgccttacactagcaatatttgcagcttgtagtgatgacgacgacaagagttctttatcttcaaagatagaactgtcctccaatgagagtgaagctgtgttggcaaaacctgccgaaggcgctacagctatcaccttcgatataaagtttaccgctacaggagaatggaaagctaaaacatctcacggctggttatctcttgacaaaaaaagaggtacggccggtgaacatactattctcgtcactgtaaaagaaaacaaagaagtcgccaaccgtgaggcaaaaataaccattgccggcaataataacgcagaacctgttgtagtaacagttgttcaacacggaattgatgccgaactggtgttcaacacgcccgacggtgacggtaacagtgacaatagtatggaactgaagatcaataatgaagctggtagcatcgcaggtactgtagaagtagtcagcaattatgactggacggtcgaaatcgcagaagagtggttaagctacgaaattacagaagctggtgacaatggcgtcagcaaaaatataagcttctacgcagatccccaaaaactctcttctttttcggaagaagcatccgtttcatttacttacaaaagtgcaaccaaagcaactcccgtagttgtgtcttataaagtaaaagtaaacattgtgcccacggttacctttactgttaatgatgaagaaataagcgagtttagtcttgaaagagacatagatgacaattttaaaaaaatagtaacggttacttccaattttaaaggaatattctccgacttgcccgaatggctggttatcgaaaatatcacaggcgagagtataaccgaccaagagggaattgctccatttggtgaagcggatttctttacatctgaacaaactcttatcttttcattaaaagacgagtatctggatacagaaaaatatgagcctgcatcgctaaaaattactggaaacaaaaccggagaaatcgaatttactccattgactgttaaatttaatggagccgggaatgattatatttcggttaatgcagaaggtttcggtcagcaaaatactgaaaacggatattatacttttgaggctgaaggaaatacagaaatagatgattttggcaaaggtatttctaaaagttttagtgtaaaggcaggagacaatactaactgttatttggctaaaatggtaaataaccgccctacaaatacgtatataaatgggaaagatgataatgcagatgaatggtgggcaatggttagacctaaacctgctacccgaagtaaaatagaaagccaagagtatgatttgattttaaaagatcgctacatatatgagagccctatggatcctaacgctgcatctaaaaaacgttacttggcattatttgttgttccgaatacagttgaaacgtttgcagatctatttgacgaggatggtgaactacttcccgaatacgaagacaaattcatcaaagtcgagcaaaaaggattgaagaaaaactatgaatttgttgttaaaggactttctttaggtggtaccatctatgaattaaaagatggtaatattacagttcccgcaacaggcggtgaattccaagtagtgctcgaagcaaataatatcgatatggaaactgacggtttaggattctattatcgaataacgggcgaaccttatcaagaaggttgggacggtatagcttcttatgctccagacgccccggattcattcgttactgctacaattaagggtaatgaagatggtagtgttagtagcactttgacaattactgaaaatgaaagcccatcaccacgcacagagagatcttgcggatttgtagcagatacaggaaatgaattattgtgtaagtttactattacacaaaaaggtaaagaataatgatttataagagaaaaacaacgatgaatttaaggaaaaatataacctacttattcttttccttcctctccttgttagcagttacagcatgttccgatgaggatgatgctgtaattgcaggaggaaaaggatacttgcagttacgtctgtttgccgagggtaccacacgtgccttaaacgatatggcagatgctaaaaagatagaactcgagttggactgtgatggtctgactgtcgttcaaactttaggactttcttccgtaccggaagctgaaggtgcaggcttgataacagaaaaaatagaattactgaccggtgactatcaattgatgagttacactatttacggtgcagtaaaaccgggcaaagatacaccggaagagttagcatacggctatccgggcgatttaaacttccaaatcgcacaaggacatctcacagaaatagatgttaatgtagaagctaccttacgaggtaaaatcagctttaatctgataaaggacctctccaattatcaggaagagatggataaggtgaacaacgcatctacacgcgcaactgcaaaagatgagacactgttccagtacgaccagatagccgaggtagacgttacgtacaaaatgggtagccaagtggcacgtacctcacaagcaaaagtatacttggcaaccgatgcggattatttccacactgatacactttcactggttgcaggtgaatataccgttacggaagtgaagtattatgacaagaagcgccagaatctgttgctcgttaccaatccgaacatcgagattaccgtagctcctaatgtacttaacaaacaggacattgatgtaacctatcctgaaaacatgaaagccatttccgattatatggctctttatgaaatttggaaagcaatggatggtccaaattggagttatgcgggcgaaacttatgtagccaaatccaactggaaattcgatggtcgtcccatcgatgaatggggtaatcaaccgggtgtacaagtaaatgctgacggccgtgtgaaatcattggacttgggttcgttcaatgccaaaggagacattcccgaggcattgggtaaactgaccgaactggaaagcctgtggttgggaaaacatgatgatgacttatatgaaaccgaaagtgtttcttacaaattaagtaaatacagtctttatcacaaaggagtggatttacggaaaaaccgtttgtccattgcccgcgaagaactggctctgcgtcatcctcgccgcaaagcatctcccatgtgcaaccagaagaaacaggcttatacttatgccgagcatgctacatacgatgtgaacaagggcgatatattcaacggaattacaagcattcctaccactatcaaaaacttgcaaaagttggaaattctgtatatcgccaatggccggattaccaatcttcctgaggaattggtagaattgcccaacctgacagatatggaactctataactgtaagttggaagaattccccgaagcattgaagaagatgcagaatatcattgcattgaacctcagtacgacttccatcgaaggtgatacggacggtaaacagatgatggaaggtttgaatgcactgttcaatagctctaagaacctacagatactctatgcacaggaatgcggactgaccgaattcccaatggatatattagatgcagaaaatcttgttatgctcgacatgacggataataaactgactaaattgccccaaaaagaaaatgctgaatttgctccgaagtttgcacctatacaagcattctttgataataatttgattaccaaagtagagcagtttttctgcggaaccaatgacattgaaaaattctcaattgtcagcaaccacatcgaagaattcccgttattgtttaatcaaggtgcaatagacggcaaatatgcagctgaaaccattgattttacagacaaccggatttccaagttcccggaagacttcaagggtatccgcactgaaacgctttcattgagctggaatccgattggcgaggttaaaaacggagtaagctacttcccttctgcttttgccaaagctacagaaaacggccagtctcccgagcgcgtatccatccaaaacttggaaacaatgaactgtaatttggactccattacttatacagacggtttccagtacttcaagaatcttcaggcatgggacctctcgggcaacaatttgcgctacattccttacaaattcaatgtagagactttcccgtacctgactggcttgaatctgagtcaaaactgcttctctaaatttccgatagaggtattcaatgtacaaagactgtacaaactttatatctccagccagaccgacagagatggcaacacacgttgtctgaaagaattcccaagcggtatggaccaggtattcggtttgcgttttctggatgtatcgggcaatgacatccggataatttcggaagaagatttcccaggcatactgatggaatttaacgttgcagataatccaaacctggaaatgacgattccgtccagtgtttgcgaatcaattgttaaaggaacatacatgttgggatttgattcagaccagtacatattaggttgtccggcattggatttggatataaataaataagagaaattatgaaattgaatatactgaattataaacatgttttagcaatagcttttatggggttagctgtctgtatcagctcttgcaaagatgacgaagaaggtatcacaggcttccgacttgataaagaaagcatcgaattgcctgataacggcggtgaggtggcacttcagatttcaaccaacgaacgatggactgcttcttctgatgccgattggtatatgataactcctgccaacggtgaaggcagcgctgtctgcgtggttaaagccgactcatcatatatgtatacgcaacgtgagggattgattactttccgtaccgtatcgggcgaatatacagtgaagattcagcaaggcggatacgaacgtgccatcaaatttgaaagcctgcaggacgacacgttgcacgtacctcattacaaaccgctggacgaagcatatgtagacatcgaggctacagccaacgtatcttataaggtagtaatcccggaaacagcccgcgaatggctatatttcaaggacgaaaacagcccaaagtacgaggaagagtttaatgcggaaactaccattccacgcaaacaaaaagtgcgtctttacttcaagacccatatcgaatgggatagcgaacgtagagccgatttgcaatatatcgaaaccggacgtactgacggcattgtatcagaagtaggtgtgattcaggaaaaagctccgcgcatcatcccttcaagaaccggcgactcattggctctgctgactgtagcgcgtatgttgaacgtaggtgttccatggaataccagccgtcctatcacacactggaacaacgtcaagacaagacctgttacttatacatacaatgacggtaccattgaagaagaacgtactgaggagcgtgttgtaggatttactctttccatgattgagacgaaagaatccttacccgaccaacttaagtatttggaccagttggagactcttgccataacatccaattcaaactcttacatcaaagaaattgaactaggtgacgtggtcactacactgaaaaaattaaaaagtttatcattgttcggctatggtatttccaagctgcccgcttcgataggcgatatggaaaatctggaagaattgaatttaagcgccaacactttccaaagcttagacgacgttatcaagcctttgaaaaatttaggaccgaaactgaaatatctaaatctggcttcttgccgtattgtagacggtgatgcaaccaaaaacttggctgatacacctaatggtatcgatcccgtatcaggacgtcatataggtttgacaggtacacttcctaaagaaatatttacctatttcccgaatatggaatatttgaatctttcttataactacctgcatggacaagttcccgaccttgctaaaacagacttcgaaggaggagaaatcctgcctaagttgaaatatctctctatcaatttgaaccgttttacaggcaaactacctcaatggatggtcaaccacgaatatagaggatgctggggcgctgccattctgattctcaatcaggaaggaagagactatgaaggagatcttgcaggattcgacaatgaaagagaatttaccgataacatgccggattgtccgaccgatgaggaagaagaggcacagttgcttaacctaccgattcttaatgatgcagaaaaagcggctgcagctgaattttcggcaaaatatccatgggaaaaatatggcaataactgccctatctatggtaattggagatactataacagaattaaataaatagaatgatatacgaactatgaatatatatacgaaacatatatttctttattgtctgatgctgtgtacggcactgttcacagcctgttcagacgatgatgatatccaagaagcattagcagaagggcaaggagaagttatattcacgttcgagcgcaatcaggtatacagcatcacctcccttgaggagatggtgcgcctgaaagtgacgctcgaaaaagacggtgaaacaattacattacctacatttgacctgaccggtgacgaaaaagccatgacttccgaacctatccgtctggataacggtgtctatactgtaaagaaatacatcgcttataataataaaggtgtacaggtgatggaagcttatctggaaagcgataatgaactggtggtagaacacgaaagcgttacaaccttctacttccctatctcgattcgaattacttactccaataacatgttgcgcagtactttattcggaatctgtaccgagatattcggaaacgactctaccttatggcctaagacttggcgtgaagaaaatgaggacttccttacctgggaaaaccttcattttgaaaccgatgactacggcaacatcgcatacctttcagaaatcgtattcgatgaaaaattcgcagccaataccgaaaaaggatttgagggaatgaaaaaattgccgtctgccgttgccgaaatgcctactatcgagagtcttgtaatccgtaatattccggaatttgaagagttgcccgacaatctcaacaaatccggcatcagttcaattacggtattgaatacttcattaaaggagtttccgaagcattttgagaatataaaacatctcaacaccttgagcatcatcaacagtaaactcaccgaaattccggcttccttacaaaaactggagaatctgtttgctgtaaacctggatggcaacgaaataacttcattcccggcagaacttgcaaagagctggcagaaactagtctcattgagcatgcgaaacacaaaattgcagtctcttcctgctgaaatattcagtatgaagaaagtttctactttcgatttcagaaacaatccagacctttcttcgctgcctgaaacacgcggtgaaggagtagcattggcaggctttctgcttgatggttgcggatttacttcaattcctgcaattgcagcaacggaaggtatccgtatgttgtcattggcagacaacaagattacatctgtcagcaacaatgaattgagcactactttacaatgtctgattctggatggtaacccgttaagcgccgctccggtaatcaatcacgagaaattgatggaactgagcttggataactgcggtttgaccgagatacccgatgtaagcggattacccaatttacgttctctgtatgtagcaaaaaatcatattcaggaagttaaggcagatgctttcaccaaatgcaaaatgttttcaacactgggcctggaaggcaacaatgagttacaaagtattgacaataatgctttctataccactactgattacaaattggaagaatcgacgaatacatcaattgcaaggcctatttatatggtatgtgtagacgtagacaattgtccgaatctgacctgggctattcccgattcctggaatcacattccaactatagatgtcacaaacaaagtcggactcaaattcggtgattctcatgtagttgtttatcataaaaactccaatggagtaacacgtacgcaacattgtaaagaaccactgaaaaatggcaaagagtgtggaaaaaaccatgatgcgcgtcctgtgaaggattttgaagagtggaaagaacagaatcttaaataatgaaagtatttgctctatccatatgtacactattgctgttttcagtaacagcctgtgaagatgatacattgcctgccggcaatgacaatccggctgtacctgaaaacgcatatatctgggacaatccccatacctcctttttcggactgaaggggaatgtctccgatgtacatcaacaaatggttaatccggccaccggagaaggtacggaaacagaagagccgtttcatgtaacggactattcctttgatacaaaaggaaatctgacttattataacggaaccggtgcggaaccgtcaacacgtatgttgggagtagacttaaactacttccaatatacatatgacgaacaaggcagaatgagaactattgccgtttatacactcggtacaacttctcccacggtttacaatatctcttatgatgaacaggaacgttatattccgctgccattccctttgggagagatgaacctcttttgtgtaaaaggagtgaaacaaattataggtccgtcagggaatatctctgaatggaaatcggacaatacattcgtacatacacaaatagtcaatgcagggtctttgtttgaaacacgcaccaaaacagtttatacctataaagatacagaaaccttgtttcctgaaagcgcaacagttacaacatatacaaacgaggaattggaaagtacggaaaatattcattatcaatggaacgaaaaaggtgctttactcttttccaagcaagaatgttataccgctgacggaacgctggaagtgtctgtcgctactagttacagcgaagccgtgccgcttgcaccagtacttatcaaaactgacgcacaaagttatgttacggaaatcgcctatagttacgacagtaacggtcggttaaaatcagcaatacgcaacctgccggcaacagataatccggaagaaacccccaaagagctatatgaatacgaagaaacggacacacaaggcaactggacaaaatccattcagaaacagagtgaacaaatcgattggagccattggagtggaactttctacgtacaacgtacaatcagttatcattcctgataatcaaatttactgacaaagctcattttttaccaacaactctaacaaattctctcttgagcttaactcaaacaagcggacacaccgttgttccgcttgtttctgtttttccgtactcctacgggtaatgactatctcccccttttcgcccggagcgagtttggctggtatcattacagcagaaaaatccggatcttccgttttgaacccaacctgaagagaatgattgctcgaattgattaccatgacatttgatttctgcatctgtgtccccagtttcatcggatgaaaacgcaccaaagtagtacgtaattgcaacttgcccaatacatacgcatatcccgcatattttcgcggctttccgggtcttacatagcctttaacctgcaatacgaaaggattctctttcccggaaaaaaatacggtcacagaacgattgaacactcccggtcttccggcagggttataaacaatattaatgctgccctgctttcctggcaatatcggagctttggaataattcgccgtagtacatccgcaggttgtcctgacagtagcaacagctaaaggagctttcgttttatttgtaaaaatataggtagccgtaaccggatcttcatcttcggaaacagtacctaaatcataaacagtcttattgaaaactatgtcttgtgccacgatttcacataaacccaaaagattcgcaacaatcagaaaaagaattcgcatgagaatatcggaaattatatttttcaataagagacactcacagccatccctgcttccctcaccaatgctgcaatacggtccagttcctcatgagtagccttttgcaggtcatggtcgggagtttcccggtcaatagtataaatcatcacctggcggggagaaatctccttgacggcctctaaccagggcaaaacatatttatcggaagtattatccatatccttatctccaaagccgcctttcaaaaacatggtttggataatgcagttacccttaaaagccttcattcccccgattatcccgcggacggaataatgtcctgccggacggtcgagctcacggatataagcttcgtctgccgtatccagtttcagaatattgttatccactttgttcaaagcctcgaatacggcaggacgatgaatgaaagtagaattgctcaatacgcttaccttggctttcggaaagtatttgtcgcgcaaagcaagcgtgtcttctatgatttcaggaaaatgcggatgtgcggttggttctccgtttcctgcaaaagtcagtacatcgggtacgggtccgtttttctgcatatcctgcagacgggcttccaatgcggcacgcacttcctctcgtgtggggagcggcttcttgggacgatggtcggaattaaacccgcactcgcaataaatgcagtcgaaagtgcacaccttaccgtcttccggcaacagattgattcccaaagatactcccaaacggcgggaatggacgggaccgaatatgggagacggataaatgacagtcatttgatttactatttacaaattatgatttaacagcggtgattggcggttttccgatatttcaaagacaaaccgcgtaatcagcacagcaaagataagaaataaacatccagatatttccaaaaatacggcagttattcttcaaaacttaatacgaaactgcatctgcaagtctgtttttgtatttccttctatcaaatcgttacccgaaccgatagtttcacggtcccggtaagcggtttgcccgaacttaacgagaaacataaaagttttgttcaaatcacaacgtatatgagcagaatagcgaaaaccactgccgtagaaagaaggagtataaaacgtataaaccaatcctttttcggaagcataaatccgcgaatcgtaatcgtccgtatggaaataagtaccttgtacggatacggccaaagggaatccggaaaaagtataagcgcaggactgggtacattgccagccttgttttccttcaaactcatgccctttcccactctgctggcgaaaacagttgtaatcgaccgtggtgcggcatgaaaaagctcccggcgtataagcaagtctgcaacggagcttgtgatgaaagaccggtaacgtcactttcccgcctgttcccgacacatccctctccttgcgcttataccggtaattgagatatagcaataagtctttctgcggagaataggtagcctgaaacattccgtctattccctgcgaagccttgctgatgcgatacttccaccaggggaaagagaacatatccaaagaagcgaaaaacttccaatgcgcccagggagcagcttccgcagccagataccagccgttttcgttttgcggagcacttccttcgccgaacgaacgcccgaagaaagaccagtaatcgtgggaataacaacgatgtattaacagcagttgataacctgttaatattttatatttcagttggttcagcaaggcatatccctgtttaccaacagccccctctcctatccataccaaccttccccaacggtatttataatccacacccagattataaaaatcatttccatgcaagttgtatttcgcatacttctttaaatccggttcataaggatgactgaaacgataataaatacctgtcacccccactttcaatctatttttttcgtaagtgaggttaccacccgccgattgcatgacaaatgcattcattttatccgcctccttctccgtacggtgcaaacctgttttgtaaatggaagcgatttttccgcctttcaccactccatccatagaacggtgcgaatagaaagcggaaagttctaaaaaacgaagaatttccactgttaccgccgttccgcgaaaatagttatacgagtccgtagagctgtgtttccggattccccctctgcggaattcggatgcagacatggagaaagtttttcctaatccaaagtctgtgccaatcaccaggccctgcccgaaccccagtttataattacccaatgccaaagctttcagcctgcccctgtttttgagtaagccgtaaaacgaatagtaatcataccctttcttgtcatgcaaagcaaagaacggttcaccggcatccttctctcccgttattcccgcctgaaagtaatctccataacgaaaactgtaacgcagtgaatggtaaacggcaggtcccagatagtttttctcatatcccttgcgggtatataaagggatatccagacgtgtcaatacttcttgcccggcatacttcaataccgtttttaaagaaggatagcgggaagggccctcaacggtctttatgcagacgaagggtaacagcagttcgatagtctgccgatccatctccgccaccaactgcaactcataaagagtctgcatctgcccgtttatataaacatacgccaaaatattttctatttgaatatccgtaaggaaaggaaattcctccaattgccgttttgtggcggtattgatattgacaggttcttgcagacgagcggaaagcacttccagttcatcttcccagtttctctcttcttcatcggcggagagttgttccagattctcttcccacagggataatgtcgcattttgagctacaagcataggagttattaacagcatactcataaaaactcctatcttgattagggtcatctataatagtgtgtttccggataataggcaacgaagttaccttaaattagttaattgaacaaggaaaaatgaaagcaatgtaacaacattacgcagaatggtgtacttttgcgctatgagcaaacggtttaacatagtaatactcataacatttctctcggcaggaatcctgacttgtcatgcccagcagcaaccccaaaccggtgcatccaaaagcatctatctcactcctatgtgcgtgtacaacggtgatacgattccttacgtgaaacttcctaccgtttacatcttcaaaccgctaaaattcaagaacaggcgcgaaatggcgaaatactacaaacttatccgcgacgtaaagaaagtgcttcccatttcaaaggaaatcaaccgggcaattatcgagacttacgaatacctgcagaccattcccactcaaaaagagcggcaaaagcacctgaaagctgtggaaaaggggttgaaagaacaatacactccccgtatgaaaaagctttcctttgcacaaggaaaactgttaatcaaactggtagaccggcaaacccattccacttcctacgaactggtaaaagcatttatgggaccttttaaagctggattctaccagacctttgccgcactgttcggagccagtctgaaaaaacaatacgaccctacgggagatgatgcgcttacggaaagagtaatcttactggtagagagcgggcagctctgataacttcagtacatcatttaaaattaatgcccgccttacgtgcctgcgaatgttgaaactgacgttttacggtatataaagtgccttctttaacaaatttagaacctgtctgtttaaaccagaaagaaacattgtttttcacacaaatatcgtgaagcttcataatccagtcgaaattacagatacgggcctcatatccggactctccccctgcaaccacttgttcaacccactctcctatattataggcatccaaactgatttcttccaacaacggctcgcaaataataattttgtgttttataggaatagctctgtaaacaggcaaacgattatccgcacataactgattttcaactgtacaacagatagttacattatcatatccgtctttccaatcgacaggcagacactccataaccctgtttatacgtttggttatcatcaggaaatgaagatcactgcgttgacgaatcatttcccatgcctcagttcgccacgcatctgcatcttcaacaaaaaaatcggaagtaaaacaggtataaacaagagttccgtccggaattttaaaacttccgttcttattcgtccgtacaggcaaatcgaaatttttcgtcttaaccacaaccgaactgtcaacattcctttttgcatctccccggtagacataacaatatctgcatccttcactgaatttatggcaaccgtgccataaattccacatcaccgacctctctgcaataccattcatccggataaaatatcagttaatattatgttgataaacctgttactaacgtaaacatacaaaggaaataaataactgttatataagcaaataagttggttgataaatcaagtataaagctgttaattactaatatttgtccactcacttcaatttattgaataaatcccagataacaatgcctgccgtaaccgatacattcagagaatgcttcgtaccgtattgcggaatttcaatgcaaccgtgagaatggtcgataacttcttgttgaacacctttcacctcattccccattactatggcatactttctgtttttgtctaaagtcaactcattcagcataatactaccttctgcctgctctacggagtaaaccgtatagccttcgtttttaaggttatcaacagcttcaacagtgttattaacatacttccagtcgacggtaaattccgctcccaaagccgtcttgtgcatttcggcatggggtggagtagccgtaatgccgcacaaatagatacattcaatgcgaaaagcatccgaagtgcggaatacggaacctatattatgcaaactgcggatattatccaatacaactacaagcggcagtttttccgcttccttaaactcctctgtactaatgcggttcagttcggttatcttcagttttctgttcataatcgtaaggctttgtgccggtctgtacactatgtaccggctcatgtcgtgcaaagatacttctttccgttcacatccctgttaataaccgttgaaaaggtgtcaatagcgtatggaaagatttttaaaaataatatttgcattattcaaagtaacgcataatacgtctgcataacgaacaaaccaaaaaagttaaccttaactttcaaaggctgtataaacacatttttaagtactatttcactgattaatccctttaaagttattaactttgcggttatcaacaagatgttaatgaagtgagactatggcagagtagggagcttattatcaagagatataactttaattgcttacgttaataacctaaggataaagtttagccttgtactaataacttcatgggcaagaaaatttggatttatttgtccacactattaacagcccatcatcactatcaaaggatttttaaagaaagaagagaaataaaaattattattatggataatctgatagaagctatcaagcaactgaagaaagagaagaatgcaatcattctggggcactactaccagaagggtgaaatacaggacatagccgactatgtaggcgacagtctggctctggcacaatgggcggcaaagacggaagccgatattatcgtgatgtgcggtgtccacttcatgggtgaaacggcaaaggtactttgtcccgacaagaaggtattggtgcccgacatggcggcgggttgttcgcttgccgacagttgcccggcggataagtttgcacagttcgttaaagagcatcccggacatacggtgatatcctatgtgaatacaacggctgccgtaaaggctgttacggatgtagtggtaacttccaccaatgccagacaaatcgtagaaagctttcccgaagatgagaaaataatattcggtcccgacagaaacctgggaaattatatcaactctgttacaggcagaaatatgttgttatgggacggggcgtgccatgtacacgaacagttctcggttgaaaagattgttgaattgaagcagcagcatcccggtgtagtggtattggctcatcccgaatgcaagagcacggttttgaagctggcagatgtggtaggttctacggcggctttgctgaagtatgcggttgcccatcccgaaaaggaatacatcgttgccacggaatcgggtatcctgcacgagatgcagaagaaatgtccgcagacgaagtttattccggcaccacccaacgacagtacctgtgcctgcaatgagtgtaactttatgcggttaaacacattggaaaagctttataattgcctgaaagacgaatctccggaaatcaaggtggatgcggaaatagcagagaaagcggtgaaaccgatcaagaggatgctggagatttctgcaaaactgggattatagtgaattattcccttgtcgctggcattcttcgatgagggtatgaaaatgatttcaatattttttcaggcacggattacatggaatttacggttttcataaaccggaaccatgtaatccgtgcctgaaaatttatcataatgcaagcatccgcatacttttgccactttcattacttggacaggaagttgcaaagcttatccgttgccactgcccggtggctgattttattcttcaattcgcttcccatttcggcatatgtctgcgtatatccttccggaataaagaccgggtcatatccgaaaccggaagtaccgtgcctgtgcttcgttatttcgccttttacgatgccttcgaacaagtgttcctttccattgacgataagtgcgaaaacggtacggaatcgggcttttcggttctccattccttccatatcctgcaacagcttctgcatattggcttccgaattgtgtgcatcgccggcatagcgtgccgaatacactccgggagctccgttcagggcttccacttccaggccggtatcatcggcaaaacaatccaggtggtaattttcaaagatataccttgccttcagcaaagcgtttccttcaagcgtatctgctgtttcgggaatatccgcactgcaatggatgtctttcatgctgagaagctctattttatctcctaaaatagcggttacttcttccagtttgtgggcattgttggttgcaaaaacaaatttctttttcattttcctttcaatttatcgaatccttctccatacacgccgataacggagctttgagagatgaaagcattcgggtcgatgtccttgaccagacggaatatctcgacagactggcgtttgtaggccaacacaaccaatactttcacgttgcgtttgctgtaccagcctataccgtcgagtacggttacaccgcgatgagtctctttggtgatgcggtcggcaatcttttcgtactctttggaaaagataaagaactgtaccgactgacgcgcaccgttgacgatataatccagtacgatgccgatgacgaacagcgttacaaaaccaaaaatcacccgtcgccaatcgttgaatatgaagtagcaggaactgatgatgataacgtcgcaagccataatcatgcgtcccaaagtgacgtcgcggtatttatggatgatggctgcgataatgtccgtaccgcccgtacttccgttgcagttgaacactacgcccagacccgcaccgcacatggctgcgcctatgaggcaagccatgaaatcctgtcccggtcccagtatctgaggcggcactccgtccgctccgttcaccagcaactggaaaaaccataggaagaaagtcagtccgaagatggcaaatgtggtcttgatactgaatttaggtcctaaaatcttgatggcaaacgtcatcaggactgcattaatgatgaaatacgaccattggataggaaatccagtggcataatagatgatggctccgatacccgtagtaccgccggtcgtaatctgatagggaataaggaacgcagcccatcccatagcgtaagaaattaatccgaaagtgatgaagacatagtctttcaactctctcatcacttccgctttggttggttttgtgatttgcatatttgttatttgataacaatgtttacaatcttcttgggtactacgattactttgacgatggtctttccgtctgtccatttcatggaacgttcgtctgccaataccgtttcctgaataacatccgatgtcgtatcggcagggaattccatgttgaaacgtgcttttccgttgaacgaaatggtgtagttcaccgtattttccaccagatattcttcgttgtatgcaggccattgcgcgtcgcatacagaacctgtgttacctaatgtctcccacaattcctcacatacgtgcggagcgaaaggagccaacgtaacggtaagctgattcaatatctctttcttgctgcatttcagcgcggacagctcgtttacgcaaatcataaaagcactgatgcttgtattgtaagagaactgttcaatgtctcccgtcacttttttgatgagcttgtgcaaggatttcaactcttctttgccggcagcttcatcagttaccaggtagttgccggtacggtcgtagaacagcgaccagaactttctgatgaagcggtgtacgccgtcgataccgttcgtatcccagggcttggactgttctacagggccgaggaacatctcatacatacgcagcgtatccgcaccgtatttctctacaatcatatcgggattaaccacgttgaacatggatttgctcatcttttcaacagcccagccgcagatgtatttgccgtcttccaggataaactctgcggtagcatactcaggacgccatgccttgaacgcttccgtgtcgagaacgtcgttggacacgatgttgacatccacatggagcggggtagtgtcgtactggtctttcaggttcagcgatacgaatgtattggtatccttgatgcgatatacaaagttgcttcttccctgaatcataccctggttcaccagtttttggaacggttcttcgacggcggatacgccgaggtcgtgcaggaatttgttccagaaacgggagtagatcaggtgtccggtagcatgttccgtaccgcctacgtagaggtctacgttgcgccagtattcatccactttcttgtcgatgagtgccgtgtggttgcgcgggtccatatagcgcaggtagtatgcgctcgaacctgcaaatcccggcatggtgttcagttccagcgggaaaacggttatattgtcaatcctttcattatcgaccacgcatttgtttgccgtgtcccaagcccatttagaggcatgtcccaacggcggttcgcccgtttcggtgggcaggaatttggccacttcaggaagttccagcggcaggcagctttcatcaatcatataaggcattccgtccttgtagtaaaccgggaacggttcgccccaatagcgctggcgcgagaagatggcgtcgcgcaggcggaagtttacttttacgcgtcccagattatgttctttcacatatttcttggtggcggcgatggcttccttgacagtcagtccgttcaggttgaggtcgcaataaggctctgtacctgctttcggagagttgcatacgataccctctttggcatcgaaactttcttcgcttacatcgcagccttccaccagcggaacgataggcaggttgaagtgcttggcaaaagcgtagtcgcggctgtcgtgtgcaggtacggccatgatggcgcctgttccgtatcctgctaatacgtagtcgctaatccagatgggcactgcttcgcccgtaaagggattgacggcatagcttccggagaatacgccggtgacgctgcggtcggagatgcgttcgcgttcggtacgtttcttggtacgctccaggtaggcgtccacatcggctttctgttccagagtggttacttgggccaccaattcgctttcgggagccagtaccatgaaggtaactccgaacatggtatctgcacgggtggtgaaaatggtaaattccaaatcgctgtcctttaccttgaattggatttcggcaccttcactgcggcctatccagtttttctgcgtctctttcagagattcggtccagtcgatggtgtcaagtccgtccagcaggcgttgtgcgtaggcagatacgcgcagacaccactggcgcatctttttctggactacggggaagccgccgcgttccgatacgccgtttaccacctcgtcattggcaagcacggtacccagttgcggacaccagtttaccattgtttcacccagataggcgatgcggtagttcatcaggacttcctgctgctctttttcgctcatggcattccactcatcggcagtgaaatgcagttcttcgctgcatgcggcattcagtccttcgttaccggatttggcgaatgcttctgtcagttcttcgatagggcgtgctttcttttcgtcattgcagtagtagctgttgaacatcttctggaacgcccattgtgtccagtgatagtattccgggtcgcaggtacggatttcacggttccaatcgaaagagaaacctatcttatccagttgctcgcgatagcggttgatattgttgacggtggtaatggccggatgttgtccggtttgtatggcgtattgctctgcgggcaggccgtaagcatcgtatcccataggattcaggacattgaaaccttgcagacgtttgtaacgggcatagatgtccgaagcgatgtatcccaacggatgacccacgtgcagacctgcgccgctggggtagggaaacatgttcagtacatagtatttttgctttgtttcgtcttccgtcacctggtaggttttgttctccacccaccgtttctgccatttcttttcaatctctctgaaattgtattccataatggttgtaattatattgttgaaaacttgttgatagcctgtttaatttggtttatattctgttaattaaacggtgcaaagttaagggtttattttcagatttgtagcgaagtagggtaaaaaaacagcatggaatacttgacaatacgctttttattcgctatatttgtgaagtgcttttaaaactaattttttgtttgtaatacaaataatggctgaattacttcaataggattttacaaaaaagattttttaggatatttcaaagggtgtaatctgtgaagattgcatccttttttgtttgtatttattacaagtgtcgcgatagggggaaaacaggctgttaataaattcggagagaattttactataatttttttcgaattatagtaaaattgcagaagggtttattaacagcgtttttttgttgtacagaaaaaggaaatcacttgttgcgaataccggcttttccatatactatgtgggagcgaagaataattacatttcccgttctgttgtgccgtccggctggtatgtatcgggcggaaagaaagggaagcaatccatgttttcggggcaaatatccccttgttttatactgttgatattgaataaatttttaatattcaatattttaacgggatgttttcattctgtatttatccccctgcatctgcgttcttgtttgtgttttgctttctatatttgttttccggcattccgcagggtgggatacggttattattatttctttaaatacaatatcatgatatgaaacagacatttgcttttatttctcccgtagtagattctacgcaaagtgctatccgtaccgaagcctacgaacagggtgtggacttgtataaccggggtgagtatgtacaggcttttcatagtttgctggattatttgaacgcggactttcgtaccaagtacggtaatgccgacggtacggagtttcacattcctcatggttccattcttgtacatatccgtattgccgacggttttttccatatcaatgccgatttcctgaatctgccggaaaagggtagggtagccatgctccgtcaggtggcggacttgaacctgaataaattgttattgccccgcttcgtaaagaacggtgataagttgaatatggaatatgtttgtccgctttcacagagtcatccgcataaaatgtatttcgtgcttcagaatatctgccacataggcgataagtatgacgatgagttctgtacgaaatttggcgctacccgctgttacgagccgcaggtgactccgtatccgcaggaagaggtagaccgcatttatgaaggcatacagacattgggacgcgaaacgttggaggcactcaaagagtatggggccgaccgccggtacggttattcgtggaatgtgctggataccgctttctaccagatttcctattttgcacatcctcagggacaattactgaacgaccttgacaaggcagtgaatgatatggatgccgacctgcctacggaagaggttgtatcaaaaggaaaagcatttcttgaaaagctgcttgccgttccgaaggaaaaactggcggaagacctttactacacggacacgttggtatctgcaaagcgccgttcttccctaaaaaacgtgcaggagaattttatgaatgtctataaagaagccaccgaagccatccagtcggagaattatgaacgcagtgcggtacgcttgctttatgtgttctacgaagcttatttctataatgatatgcaggacgatatcaatgccgttatatcaaaagctttgaagaaggcaggcaaccgctctttggaagaggcctctgaaattctttacaacgctatggacaagattatggaaggcgatttggacgatgaggatgagacggactttgctgccggcatggaacaggtgcagaaaattacggaaaccatgggaagtgacgacatgcaggtgttgcaacagaaaatggcggaagccatgatgagcggtaatatgcaggaatactcccggctgatgcttgaaatgcagaagaaggtgatgggaattatgaattaacttaacggtatctaaactatatattatggatcagaacatttataaactcgtatcactactgtcccgtaaaagtggataaatagttctttgaaattattgaaatatagtcaattacacggttttttgaaatgaaacggacttgattttgcaactttgcagtctaatacaaatggctgctatgttccaagacaaatacgtattctctcaattaaccgcttttctgaacaggactcagttcaacaactatgttcgcaagtatgatggcaacagatatgtgaaacatttcacttgctggaatcagatgctcgcgatgatgtttggacaactgagtaaccgtgagagcctgcgagacttagtcgttgctttcgaggcgcatagggccaagcaatatcatcttggtttaggtcgtgaaccgatagccaagacaactcttgcgacagcgaaccagaaccgtgattacagaatcttcgaagactttgcattctatatgatgaaggaagcctgcgagaagcggacgaccaacatccttgacatttccggaaagaaatatgcgtttgattcaacaacgattccgttgtgtcttgcaacattcccatgggcaaagttccgaagcaagaaaggaggggtgaaagctcatgtcttatacgacattgaagcacaagttcctgccttctatactgtaactactgcatcaaagcatgattccacagcaatgtcttcaatccattatgaaccaaatgcttattatatattcgacagggcttatgactcctttaaagaactctataggatacatcttacagactctttctttgttgtcagagccaagacgaacttaaagtataagacagtcagatggaagcgaagaatgccaaagaacataatgacagatgcggaagtgaaactgaccggatatctctccgagaaaaaatatcctgagtcattcagactcgtccgatattacgacgaagaggatgaccgtgagttcacttttttgacgaatgcaaaacaactttctgcactggatgtcgccgatctttataagaaaagatggttaatcgagctgttcttcaaatggctcaagcagcatctcaagataaagaaattctggggcacaacagagaacgctgttcgcatacaaatcagtgtggctattatcacgtactgtcttgtggctattgtccaacatgatatgaagttgaaacgttcaacctatgaagttttacaaattctcagcatatcattgactgacaaaacccacttgcgtgacctgttcgacaagactaatttcaatgatgtcaaagatctaaatgatcccctgattccggggctttttgattaattgtttaactcgtcccattttaacgggacactaatgaactcgtatataaggtgacacatgccggcggttccggaagctgtttctatctgaaatcttataatctttttgtaacgaactaccatgtggtgaacggtttccatactgttgccatacatgataacgaccggaatccttaccttgccaaagtggtgctcgtaaatccttctttggatattgccttattggctgtggatgcagacttttcagctcttcccgaactgagcctggctgcggacgattcattggccatcggcggaaaggtcagtgtggcggggtatccttacggcatgccttttacggtaacggaagggtcggtttcctcgcccaagcagcttatggaaggaaaatattatatacagaccgatgctgccgtaaatcccggcaattcgggcggacctatcttcaatgaaaacagtgaagtggtgggagtaacggtaagcaagttcaccaatgcggacaatatggggttcggtgtgcgtgtagaggcattgcgtaagcttttggagtcggttgacggggttgaccgcaatacattccaggtacagtgcgacagttgcgatgagctgatatccgaggaagaggaattttgtccttcctgcggcgaaaagttgccggaagaagtttttgcggagcgtgaacagtcgcctttgagtgtgttctgcgaacaggccattgccgaaatgggagttaaccctatccttgcgcgggacggttacgattcgtggacgtttcataaagggagttcggagattcgtatttttgtgtatgaaaacacttatctgtttgctgtttctcccattaacctcttgcctaagaaagaggtggaacgtgtattggactatatcctgagtgaggatttcgctccctataaattgggcattgaaggccggcagatttacatggcttatcgcatccatctgtccgacctcacggaagagtcggaagatgaaatccgtaagaatctggtgaatcttgcctttaaggccgatgacatggataatatgctggtggaacagttcggatgtgagttttcggaatattccaagcaggaagcataacggctttagccggaattacaggatagaagaaggtgtgtccgattgaacttcacgaacgcgtgttcatatcacaatagcgcaccttcttttatttggattagaaagaaaaagtattctatgaatagagaaaaatagatacaaaacagtaaagaaacgtcagttggatacctgtttttccattttctttatttgctttgaaaaattataacgtatatttttattgatatataaatatacccttgcatacctctttatatatcataataatcagttgtaaaatagatatttattgggtgtgcagtattccgtaattataccccttgtccgttttcttattcagtacctatcttttatttttgtcctataagcccgttggtgcgttatacgactgttttcaacttttataaaaagtaataattatggataaaaagagtaggattttgaaagaaagagctatgaagaaatgtgtggcattgatttcttttctgatgtttctgcctgttatggtacaggcacagaaggagtatccgattgagcaggtatcggctatcaatgtgggtgacggacgtattctttttcgtgacctgaaaacagaaaaacccttgaacggagaccaccgcatcatagacggttatcactctgcttatatacaggctgaatttaaggacggtttttacaacggcaagtatggagagtatgaatacaacaagctgaaatgcgacggtacatacaaggacggcaagaaagacggtgtatttaagatgtacgatagcgaggggcgtgtgcaggaagagaagtcctataaggatggcaagctgcacggcgcccataaaacctattttactaccggcaaggtagagcgtgaggtgaactaccgcaacggcaagcaggatggaaaggatatggtttatgagtgggacggtacgttgcgcagggaccatacttataaagacggtaagcaggtaggcaaacagtttactttcctgaaagggacgtacgaactttatgagacggaatattataatgaatacggcatgaaagacggtgaatactcctcgatgtttactttcgggcagccacatattctggggcattataagaacgaccaaaaggacggccggtggattgaaattgccgaaagtggcgatacattgtcagtgaagacctacgtcaacggcagggaagaaggactgcatatatcgtatgaccgtaatacgggcgcccgcagccgtgaattttacctgaaagccgaccgtaaggacgggctttatcgcgaatataatcctggcaatggagagcttgtttacgaagcgacctaccaacacggccgtctgcatggtaaggagcgccggctgattgttaccaaccgttatgattattgggaaatatccacttatgtaaacgggcggaaaaccggactgttcgaatcgcgttacgtgaagaacgacgccgttcgtgaaacgggcgaatacctcaacggcagacgtgtaggccggtggaaaatgtatgacatagacggtaagctggaaaaagagtgggaagaaacaaaacagtatcgggatgaatgagatacgctattcgaaagtgcttgtcgttttgtgctgtctggcattgcatattgcaaccttgtcggcgcaaaatgacagtgtaagattcttcaatgaagtagatacgtctttttgcaaagtgcatgtggggcaggatgtccgggtcggctattacagtaccggagagatttacgacatgtccgttccccggtgggacgactgtgaggcggagctggtgtcgggcccgcattctacgcggtcgtcaaggacttcttttgtaaacggcaagcaggagaatctttcactccacggaaactattacatagtccgtttcaagaaagccggttgggttactctgccttcggtacgggccatgacaggagggaagatgcgtacctgctctacgatgaaggtctgcgtacttcctgcagagaatatagaagaagtggtctgtagtgtcagcaccgagcctgaaacactccggccgggagaagtctttaaattcgtcctgacctgcaaccgccatcccgatgagagcagacccgaactggagcatctcggtatcaggcaactgtcgttttccacccggtatagcaagaaggacgggaaagaggagtatgcgtttgtgtacagaatggaagtggtacggtccggaagcaatattatcagagtcaggaagttgaccttcggcggtacggactatccgataaaaccttttttgctgaaaatagacggtgagacctatttgtaggaaaccggctgataaccgtactgccatatgagtaggaaaaagcaaagattgaagcacacacccagacagcggtgccgtgaggaaagcatacgggcggagtctgccgggcgaaagggcaggattgctttgtggaagattgcagttccggtgataatcgtactgtttttgctgcattgccgtgcctggcatccggaagaagcatggttgctgcgcacggctttttcaacgggcagctatcaaagtctgaatgcggttgtcgcttctgttctgttcgttatcggcatggggggccggatgctgtatgtgtatctctgttgcggccgggacgagaagaaaggagcaaggcggctggggagaaacatgctttacggtttgttctggggggcaggtttgtcggcattgtgtacgaatgtggtagtcgtttctctcttttggctgaatgcgtgctttacttctgccgataaaacctgcgactataggattatagccgccaaggtgcacgaccgtaggcctaaatcccgttcttcgcgctattccgcttcctggctgctgaatagcttttcgtatggcgaactgtttgtggaaggagaccggtacacatgtgtcaatgtgtcgccccgcatggcacggcagtttgaaggttcggaacgtgtttacctgaaaatagacctggcggacggttggctgggctggggagtcgtcaagggaatacatccggtagcaaccgtgtatccgcagccgcaggatgaaatccgttattctgccggtgtgcaggccggggtggcagcgggttcgtccgggcaggttaaaaagaagcatacttttctgtatacatggcaggatattcatatatttgctaaactgcgtggcataaatctgtcggacacggcacatgtcagtgtaaaccgttatgtggatgcaagccgggatatgccgttatgggagattgatgtacgcgactccgtgcagccggataaagtgaaggtaatacttgtgcacggggaaaccggtgaagtggtaatggattcttatgaatgacaaattttggaacgatgaggtataaacatataatttcggttgttttgtggagtatgtttctggtagcgtgcggtcccgaccgccgggtagcgctggcggaaaaactgatggcggagaaagagacggacagtgctatcgccgtgatgcaggaaatcaaagagccgcagaacaaccttaccgaccgcgactatgcgctctacgctttattattgtccgaagccatgcaccggaaacagcagttgaatgcggaaaccgatacattgctgctgccggccatcaaatatttcagtgagtcgggagattctttgtatgccgaacgggcgttgtactgcaaggcgcacctggacaggcggctgtaccgcatgaaggatgccatgcagtcttttctgaaagccttgcttttcctgcagggaagcggcaatgacgagcagctctacagggtcaatacatggctgggagtcgtctgcctgaaccaggaagagtatgagggcaagatgcgctattccaaagaggcgttgaaggcggcgttgaggatggacaatctgttttacaagaacctggcgttgtgcgatatcgccaccggctattactttctgaacaggctggacagcgccctttattatgcacaggccgcctatgatgcggcaatagcagattccctgccgtcgcaattacctcatgtatataccgatttgggcagtatctatgccaaaatgggagagaacggaaaggcactggagtatatagacaaagctatcgggttacgtccccgtaaagatacccttgccattctcggcctgtatgccgataaggtggatttgttcgggaagctggggcagtatgactccgcttaccattatttccggaaagccgttgccagcccgaatttggcaacacaggcagatgcctataaccatatgtccggagcgtattataaaatgggacggtgcaatgaggcatactctcttctgctgcgttttacggaactggcggacagcgtgaggaagcaacgccatacggcggaagtcattgcgttgcaggagctttacaagcacgagcaactgtctgtggagaacctttattggcgcactcaggccgccgaaaggcagagcaatgtatatctgatggctaccttgtccctattgtcgctgtggatagcaagtaccatttatttcttttattggcgcaaccgccgccggctggtggagcagcagcaccagcttgccagtcagcaggaagaattgcatcatcagcggcaagtgactaccgagaacttgcagcgtatggccgaaatggagcagaaggaagcccggctgaaggagactttcttcagaaggctgaaccagcgtatcgttcaggagatagagaaggggagcaatatccttctttcggacgatgactgggaagacattgtgcagaacgcggacattattttcgataacttcaccaggcggctgcaacaacactatcctgctttgaataaagaggatttgcgctactgctgtatggtgaagatgcaactgtcccaattggaaatgtcacaaatcatgcatctggaaaaagattcggtaaagaagcgcctgaagcgtattcgtatggagaagatgaaagcggacagcggtgtgacgctcgaggaacttttgcgccggttttagcggttgaagcgggtcaatgtaaaaacctgaggggtaaatttataaattgttatctttgtctccaaattcatagcttatggaattaaacggttatcgccttcttcttcctgaaggcactttagattactttgatcttgttgatgtgaaggaaagcgtaaatgaagttgtgatctaccttgaggagaaaaatatcgttcctgagaagtatacagatcaggatactgagagtaaaggcttttatgctcctgttattgttcaggattttcctcttcgtggcaagaaggtcttccttaatattcgtcgtcgtcgctggctcttaaagaagcataatgagtatatctcccgtaactggcgtatggtggctgaaggtactcgtatgacgcaggattttgcgtcttttttaaaagaactgtattgataactatccgatcagttgcaagctcttaggtgttttatatggagttgacggggatttattggagcgtcaataccgtaaccatctaagtggttatctccattgggaccaacttgttcatgcagaggattggctactattcgaaaagaatatcggtgcttatatctgtattgatgaggtagccctctcgcgtggggaactctatactgtactgaccaataaagaagctcacggtggtaaaggtagtatgattgccatcattaaaggtacggacgttcatacggtcacttctgtcctgcttaagctctcccgtcgccgccgttaccaagtgcgcgagataaccttggatatggctcctaacatggagcagattgcacgcatctgctttcctgcggccaaacgtgttaccgatcgctttcacgtacagaagttagcttatgaagctgtgcaggagatgcgtgtaaaagctcgctgggaggctttggatgaagagtccactcagattgcttatgcaaaggcctgtggaaagatgtatcatgcacctgttttcgctaatggagatacaagaaagcagttgttagcgagaagtatttatctgctttacaagaaggaatccttatggactcagtctcaaagaatacgggctgaaattcttttcaaggaatatcccgatataaagaaaggatattatctgtctatgcggttaggcttaatctatcatcagtgtaagtttaaggatattgctttgacaaggctggcaaggtggtatgatgaagtagataaatcagggttcctcacctttggaagggtcgcacgttctatacaaacacattatctggatataatcaatttctttgaaaggagggcaaccaatgccgcagcagagtcattcaatgctaaaatcaaagcatttagagcacagttcagaggagtaagagatagagcttttttcttatatagacttgctaaattatatgcttaaatataaaatccctcagattgttacgttgacccgttgaagccggacatgcgcgggcgttgcggatgtatgaaccggacgtacgggcataaaaaaaggagtaccgctgtactccaacctttgttaaccttaaatctaatactatgaaaaacacagtgcaaaggtacggactttcgggaaatttccaaataaagcaaataaaaaagtgtgttttataacatgttttagcaaaaatgccggctttgttaaggcttgctaaggattgaaaccctttacatacgtattttctaaaaaaggattatctttgtgacattaatcaatgaacacagagatacggtggcacagagttgcttgtgcagagcgtctgcttcatgaaaccgggagttcataccgttaaaactctgcgccaccgtgcttctgtgttccgcaaagatatacctgtatgcacgaagatattgtccttaccccgatgatgaagcagtttcttgagttgaaggcaaagcaccccgatgcggtcatgctgtttcgttgcggcgacttctatgaaacttattccaccgatgccgtcctggcttctgaaatattaggcattaccttgactaagcgcgccaacggcaagggaaaaacgattgaaatggcaggctttccccaccatgcgctcgatacgtatctgcccaaactgatacgtgcgggcaagcgcgtagccatttgcgaccagttggaagacccgaagctcaccaagaaactggtgaaacgcggtatcaccgaattggtaacgccgggcgtatccattaacgacaatatactgaattaccgtgaaaacaacttcctcgccgccgttcatttcggtaaaggcgcctgcggggtggcgtttctggatatctccaccggtgagttcctgaccgccgaaggctcctttgaccatatagacaagctgctgaacaacttcgccccgaaagaggtgctgtttgaacgtggccgccggggaatgttcgaaggcaatttcggcagcaagttctttacgttcgagctggacgactgggtgtttacggaaaccaccgcccgcgagaaactgctgaaacactttgaagtgaaaaacctgaagggattcggcgtggagcatctcaaaaacggtatcatcgcttcgggggctatcttgcagtacctcattatgacgcagcatacgcagataggacatatcacctcgctggcacgtatagaggaagataagtacgtccgtctggataagtttacggtgcgcagcctggagctgatgggcagcatgaacgacggcggcagcagcttgttggatgtgatagataaaacaatcagcccgatgggagcccgcctgctgaagcgttggatggtattccccctgaaggatgtgaagcccattaacggacggctggacgtggtggagtatttcttccggaagcctgagttcaagggagtgattgaagagcacttgcacttgataggcgacctggaacgcattatctccaaagtagccgtaggacgtgtttctccccgcgaggtagtcgctctgaaagtggccctgcaggctatcgaaccgattaaggaagcctgtatggatgccgataacgccagtctgaaccatatcggcggacaactggacatctgccgttccatccgcgaccgcatcgaaagggaaatcaacaacgacccgccgttgcttgtcaataaaggcggtgtgataaaatccggcgtgaatgccgaattggacgagctgcgccggatagcctattccggcaaggactatcttttgcagatacagcagcgggagagtgagcttacgggcattcccagcctgaaaatcggctataacaatgtgttcggttactatatcgaagtgcgcaacgtgcacaaggataaagtgccgcaggagtggattcgcaagcagacactggtcaatgccgagcgttacattacgcaggaattgaaagaatatgaggaaaagatactcggcgccgaggacaagatactggtgctggaaacacagctttatgcagagctggtgcagtccttgagtgagtttattcctgccattcagaccgatgcgaaccagatagcccggctggactgcctgctgtcttttgccaccgcagcccgcgaaaacaattatatccgtcccgtaatctccgacgacgaggtgctggagatacaccagggacgtcatccggtcatcgagaagcagcttccgataggcgagaagtacgtagccaacgatgtgatgctggacagcagtacgcagcagataatcatcattaccggtcccaacatggcgggtaagtcggcattgctccgtcagaccgccctgattacgcttatggcgcaaatcggctgtttcgttccggcggaaagcgcgcatatcggtctggtggacaagatattcacccgtgtgggggccagcgacaatatctccgtgggcgagtctacgtttatggtggagatgaacgaggcggccgacatcctgaataacctttctccccgcagcctggtgctttttgacgagttggggcgcggtacttccacctacgacggcatctccattgcctgggccattgtggagtatatccacgaacatccgcatgccaaggcgcgtacgctctttgccacgcactaccatgaactgaacgaaatggagaaatccttcaagcgcatcaagaactataatgtatcggtgaaggaaatcgacaataaggtcattttcctgcgcaaactggagcgcggcggcagcgagcattccttcggtatccatgtagccaaaatggcgggtatgcccaaaagtatcgtgaaacgcgccggtgatatattgaaacagcttgaaaaggacaaccgccagcaaggcatcgcggccaagccgatggttgaagtgggagagacgcgcggcggcatgcagctcagtttcttccagctcgacgacccggtgttgtgccagatacgcgacgagatactgaacctggatgtgaacaacctgacaccgctcgaagcgctgaacaagctgaatgacatcaagcggatagtcaaaggaaagtaacctgcgacgtaagtcgggtttcaaagaatgaaacaaaaaatttctcctgagggaacggtttgtttccccgtgagaaactctttgtttcacgtagtggaacaagaagtatcaaggcatggaactttcagtttccttaggtggaactgtcggtttcatgccttgatatttttttattgttgcggagttcttattttcctgccgttttcttgccgtggaaacacatgaagtacactccgataagtatgaacggaatgctgagccattgccccatatttagcgtcattgcgctttcaaaatccacctgatcctctttcaggaactcgatgaagaagcggaatacgaatatttcagtcaggcagaggccgaagaagaaaccgcggtggtagggtagggtagcgccggtttgcactgcggtggacttggctttggtggtgctgaagtccgttttgagcttgttttcctgctgcttttgtccgcgcctgtacaggtagaccatgcccaggaagaagatgaagtaggcgattgcttcgtagagctgtgccggatggcggggcagcatatccacccgttcaaagacgaaagcccagggcacatcggccggcttgccgataatctcggagttcatcaggttggcaaggcggatgcaacaggcggtgacaggtgtggctacggctatcatgtccagcacatccatatagtgcatcttggttttgcggcagtacatccagagggcgataatcagtcctagcgtaccgccgtgactggcaagcccttcgtagccggtaaacttccagccgccgtccggcaggaacttcacgggaagtatcatttcccagaagtgattcaggtaataatccggctggtagaacagacagtgccccagtctcgctcctaccaggatgccgaagaagcagtagaagaacagcggttcgaatgtcttttcgtcgattttccggtcgtggtactggcggtgtactattacgtaggcaagagcgatacctaccacccataacaggccgtaataccggattggaaggctgccgaaaaggttgaacagttccgggttgggattccagttgatagagaggagagtcagcatattcataagcaatttaagttagtttatatctttgttttcgtcctttggagcgtagcgcagaatctgctctttttatgtatgtattgcacggaagaggttctgcgctacgctccggaagacgaaactgtataagatggtgaggcaaaggtataaaattatttgaatttctccgctaccattctgtatgtagggatgtcgatattctgttcttcggctgccgcaatcatgtcgaaaagcaatccctgcacttcgctttggtggccgcgcgccatatctttttgcatggaagcggtgctttcgggggcaagcttgtcgattaccttgaggttgtacgctacgatatcttcctcaaacccgatgcccagtttccgtcccaaggccgcgctttcctgcgaaagcccgatgaaggtgtcgcgtactttgccgggcttctgcacttcgcccataggcacgtcgtagtaagctccggtaacggccatggccgagatgaaagaccatttgacaaaggtgtcgcggttgatgtcgggagatatgtcggccttgatgccgctttcctgcaaatcccgctgtatggctgccaatgtttcacgggaaacaatggtgtctttgtgtgccccgtaaaccaaccggaatatcttgcccatttgcgtgatttcgcctttgccggatacgaatcctacgatgtagatgcagccgtccagtaccgtgacgccgggaaccagccgctggatgcgcggacctgtgccatagacgttcaggatggggattactaccgtgtccttgtgtgcggcgtgcctgattaattccgtaatggagtctacggaatagcctttgacgcatacgaaaataacgtctgccttgtaagcgtccgccgaagaggcgagggcggcatattcctctgccgtataagccggaacggccaatgtatgctcgccttttaaatcggaatgtaacttcaatccgttttcacgtaaggcggcaagatgtccgctacgggcaatacaggtgacgtcctttccagcgagagcgagaaatgcggctattgaaccgcctacgccgccggttcctgcaatgaggtatttcaatttactgttcgtcattcattaaatggattatttgacgtaagtttctttttccatgtagtaaagcccttcaccccggtcgccgttttcaaggtcggtcagttctaccttgaagacatggtaggggagttctgctttccgaagcttgggaaagtctaccgtcagcagataggcatttccatattcattggcatcgaaatactcctttatttcctgtttcatcaatacgggcacttcttcaccgtctatccatactgtggctttcagttgttcaggacggggagccaactggcattctttagcctttttatcttgtttttcctgcttgatattgccgattttctcaccgtgtaccaatgattcgggctttgcctctttcatccatcggtagaagcgtgtcagactcatgggacggacgtatatctgataggcaggcatggctccggggatgcggaaaacacgcataccgtaggcttccatgcggtggtaacggatgttgagcgtcgtatcgcggtcggctatgaaatcccacgcccagaattccagacggtgctcggcttcgggcaggctgcttttcatggcaacgtgtgcataggaaggcagatagatggaacccacgttctgatattttcctttaggtacgcgggcggtataatatccgtctttgccggttatggcttctatgacatcgtcgaactgcgggttctgccaccaaatgctggcactgtctatgggttgtccgctgtagtctgtcacccgtccgcggatggttaccgagtcttgctgctgggcatatccggcaggtataagcaggaagaggaacaggatagcaaaaagctgtttcatatatggttatttcatccgttggttatttttatacgttgaaacggaagtgcatgatgtctccgtcctgcaccacgtattccttgccttccacgcccagttttccggcttcgcgcacggcggcttcactgccatacttgatgtagtcttcgtacttgatgacttctgcacggataaatcctttctcgaagtcggtgtggataacaccggcgcattgcggggctttccagcctttgcggtaggtccatgcctttacttccatttcgccggcggtgatgaaggtttcgaggttcagcaggctgtagatagctttaatcaaccggttgcaaccgctttctttcaggccgatgtcttcgaggaacatctgcttttcttcgtaagtttccagttcggcgatgtcagcttcggtctgtgcggagatgatgatgagctgggcatcttcgtctttgatggcctcgcgcacctgctctacgtattggttgccggtggcggcgctggtgtcgtctacgttgcagacgtagagtaccggtttcgtggtgagcaggaacatctgtttggcgcattgctcctcgtcatcgttctgaggtattacggtgcgggcactctgtccctgttccaatgcgtctttgtagcggagcaggagttcgtactctactttcgccattttatctccgccaactttggctatcttctctacacgcttgatgcggttttctaccgtatcgaggtccttgagctggagttcggtatcgatgatttccttgtcgcgcaccggatctacgcttccgtccacgtgtacgatgttgccgttgtcgaagcaacgcagcacatggataatggcgtcgcactcgcggatgttgcccagaaactggttacccagtccttcacctttgctggcgcctttcaccagtccggcaatatcgacaatgtcgcatacggcgggcacgatgcgtcccggatgaacgatttcggcgagtttggtcagtcgctcgtcaggcacggatacctgacccatttgggcgtcgatagtacaaaaaggaaagtttgccgcctgtgcctttgcactggacagacagttgaaaagagtggatttccctacgttgggcagtcccactatacctgcttttaatgccataaatatatcttgttttttaattattattcagttaattggctgcaaagatagtcttttatcttttctcttcttcgaacatgcggtgaaaaatgcttttcagacgcacctcatccgctatgatgctttgcagttctttcagcctttcggcgttctttgagtcgggaagccaaagtttaaggtagccgccgggtgcgtacttttccatcagatgtttgtgaaaacgttggtagtgccatgcttcgtccgccgcaggattttgtttcagtccgtattgtacggtacggcgcagggtgatgtctgtgtcgatgatacggtcggcttcggccacgatttttccgtaaatgctgcgcggctcatggtcgctggatgcccggtggtcttccacggcttcccgcatgattgccatctcttctttgtcgaaccattgcagaaggttgctgtcagcggctatgatttctcccgaaacaaggtgatgcgtggcgcggtcgcggcaaagccctgtgtcgtgataggctgctatggtgtagacaagacgttcgtctgcctggggataaagtttggcaagagcgaggctttcgtcaatgactgtttgtacatgcgaacggttgtgtgccttgtcgaagtgttcgtatcgggggataatctccgtttcgacgtagtggataagtgcttggggtatcatgcttctatgtttttattggaaagcaaaaatacaaaaagagccggaatgtatttgttccggctcctcagtttatgaaaaggttttgggttattattagttattagagtatatttatgagagaaaatgaatggattacatatcgggattatccattgttattgtcatttcagggataagaatataggtattctttttattgctccatttataataagtagtagttatggatttaccttcataggcatagcggatacacatgtcatgagtccatgcgttttttacggcattccatttcaacgcttcgctttctgttatacgcttttggtcatcgtatttataattgtacttcatatagttggcaagcgtactgccgtccatcttgtaaacagtttcggcaactttcattccatttacttcttccgaattgtaaataaggttacttttgttgtctgctgacgcattcattccacacacaaaaagaaaagagaataaaatcaaagtttttaaagttttcatgatttatgttttttagagtattacttactattttctatcatatctttcttaaaagcggtgcaaaggtacgcatataattgacataaataaaatatatggctaatattttatcaaattgtcaaaagtaacaagaatagtatgctttctttttggagcggttagtgaataaaaaatatccggcagcaaagatgccggatattctgatgagcaaactgtattttaaagcgattgcttctgttgctttctgattgtaagttaaataaagttatcgagcggattagtgcgcttccagccagttctttccccacccgaaatcggctttcaagggtaccagcatgcgatatgcccgttccatctcttcgattacaattttttgtataatctctttttctgcctcaggaacgctgaaattcagttcgtcatggacctgtaaaatcatctttgctttcagattgttactttgaaggcgccggtagatgagcgacatggctactttgataatgtcggcagcacttccctgaatgggagcgttaatggcattgcgctctgcataaccgcgtactacggcattccgtgagttgatgtcgggcaggaagcgcttgcggtggaagatggtttccacatatccgttttcgcgcgccacctgtatgcttctgtccatgtattccttgacttgcgggtaggtttcaaaatacccgtctatcagttctttggcttcctgacggggaacgttcatacgctccgccagcccgaagacggagatgccgtagatgatgccgaagttggctgtcttggctttacggcgcatatcggcggttacgtcattaatatccaccttatatattttggcggcagtggcggcatgaatgtcataaccgctgaggaaggcatcaatcatattcttatcctggctcagatgtgccatgatgcgcagttcgatctgcgagtagtcggcagagaagaactcgcatccgtcatcgggaatgaaggctttgcggatttccttgccgtcctcgtcacgaatgggtatgttttgcaggttcggattgcttgagctgagtcgtccggtagcggttaccgcctggttgaacgaggtatggatacgtcccgtacgcggatttatcagctggggcaatgcatcgatgtaggtacttagcagctttttcagtcctcggtattcaagtatcttaccgatgattgcatgtttgttccgaagactctcgagtacttcctcggaagtgacatactgtccggtcttggtttttttggctttctctacgatttggagtctgtcaaacaacacttcgcctacctgcttgggtgagccgatattgaaggtttcgccacctgccagtgcatagatttctttttcaatctcctgcaggcggagcgtgaaatgctcggacgattgtttaagcgcttccgtatcgatacgcactccgttgctttcgatgttgacgagcaccggtacgagcggcatctctatttcgtaaaagagatgttcggcagcgtgctctttcagttctttttcgagtacgttcttcagtttcagtgtaacgtccgcatcttcgcaagcgtagcggtatacatcttccggcggaaggtcgcgcatgttcttttggttcttgcctttggctcctataagttcatcgatgtggatggtctggtagtgcagatagatttcggcaaggtagtccatgttgtgccggagctccggttgcaatacataatgggcaagcatggtgtcgaaaagttttccttttacctgtactccgtagttttgaaggacaatcatatcgtacttgatattttgtcctactttcatggaattttcattttcgtaaagagggcggaactcattgacgatttttaacgcttcgtcacgatttgccggaacgggtacatagtaagcccggttttcggtatcactgaagctcattcccaccagttccgcttccatcggttcggttccggtggtttccgtatctattgagagaatttcttttgtaagtaacttttgaataattttctttcttttctcttctgtatcaattagttgatagtctacatcgagcatttctaagcgcgtgagaatcgaattttttgcatcacccgtcccgttgtccgcaaaatttgcaaacaaatcgccttgaaccggagcgttgtttccggaagttgtgccgtcggtgggttgggcaaataaagttcccgcataaggatcgggcgaagcggaactggaagaagagggaaggggagagactgtctttttcaggacacggtcgatgagggtacgaaattccagctcttcaaaaatcttgcggagctcttcttcgttcggctcttcgcggacaagtgtgttcatgtcgagcttgataggtacgtccactttgatggttgcaaggaatttggagaaagcaatcatttcccggtttgcctctactttggttttaagcgcacctttcagccggtcggtatgggcaagcaggttttcgatgctgccgaattcagccaccagcttttgtgcggttttctctcccacgcccggacagccggggatgttatcggaagagtcgcccatcagtcccagcatgtcgatgacttgctctgtggactggatatcgaacttcgcttttatctcctcgatgcccatgacttcgaatccgccgctgtgtttggggcggtacatgaatacattctccgataccagttggccgtagtctttgtcgggcgtcatcatgtaagtgacaataccttgtctgccggcttcggtggcaagcgtgcctattacgtcgtcggcttcataaccgggcacttccaggataggaatgcagtaggcgcggataatatcctttataataggtacggaaagacggatagcctcgggagtctcttcccgctgcgctttgtattgttcgtaagccttgtggcggaatgtaggtcccgaagggtcgaaagctactcctatatgtgtgggattttcctttttcagcacctcttccagggtgttcacaaaccccagaatggcggaagtgttgaatcctttggagttgattcgcggatttttgatgaacgcgtaataagcacggtatatcaatgcgtaggcatcaagcaagaaaagtttatcggttgaattcatatatttatcctttttttcatggtaaaagtacaaaaaaataccgtattaaccgttttattactatttttgtgctcaaatagcgatgtatggacagtatatccttcataaaatccccgatttctgcggagttggaagacttcaaaaagcattttgatagttgcctttccagttctaaccttttgctgaacagcgtgattgcgcatatacggcagaagaatgggaagatgatgcgcccgattctggttttgcttgcggcgaagctgtacaatgagatttgtccggcaacgcttcatgctgcggttgccttggagctgctgcatacggcaagcctggtgcatgacgatgtggtggacgagagtaccgaacgccgggggcagctctccgtgaatgccgtctttaataataaggtggcggtgcttacgggagattatttactggcaacggctttggtggaagtggggatgacgcgcaattacggcattattgatattgtttcgaagctgggacaggatttggcggaaggggagttgttgcagctttccaatgtcagcaatcccgaatattccgaggatatttactttgatgtcatccgcaagaagacggccgtactctttgccgcgtgcatgaaagcgggtgcgctttcggtgggagctggcgatgaaaaggcggaatatgcacgtctctttggcgaatacatcggtctttgctttcaaatcaaggatgatatattcgattactacgaaagcaaggaaatcggcaaacctaccggcaatgatatgctggaaggaaagctgaccttacctgcactttatgcccttaattcaacccgcgacaagcaggcacaggagattgccgcgaaagtaaagagcggaacggctacaactgatgaaatagcccgattgatcgagttttccaaggcaaacggcggcattgaatacgctacgaaagttatgattgagtttaaggaaaaggcactttcgttattagcttccatggaagatacggatgtcaagaaagcgcttgtttgctatcttgattacgtagtggaacgcgaaaaataagtttgttttttatacaataaagacggaatatctgtcaaagtttcttttatatcccgtcattcaaaaacgaagcgaagaaccttgtttccttaatatagagagcaggttcttcgctttgttttatataacggatatatcaaccgtgttcctcttaaaagaacttcatttcttcgcctttgatttccgacagcaggagatttgccagacggctggttcctaaacggaacaatccgttgttcagccattcttcgcccagcacttcttttacaatggtgtagtagatgagcgcatcgtttacgcagttgatgcctcctgccggtttgaaacctatcttgttgcccgtcaaggcatggtattccttaatagcctgacacattacgtaggctgcttccggagtggcggcaggctgctgtttgccggtggaagtcttgatgaaatcggctccggcatacatggataggatagaggcctttttgatgttggctgccgttttcagcgcgccggtctccaggattaccttcaggtgatgctccttgcaggtggctttcagctcctgtatctcatcgcacatggtttcatagtcgccgctcaggaactttcctacggagattacaatgtctatctcatccgcgccttccatgattgccatggcggtttcggctacttttacttctatgaaagtctgtgaagaggggaaacctgccgatacgcaggctatctttacgtcttccacttccagcgtatcctttactacttccgcaaagttgggatatacgcagatggccgctacgttcttcaaatcgggaaattcttcgtcaaactggtttaccttttgggtgaatttcatgacgctttcatcgctgtccgtactgttgagcgtggtcaggtcgatgcagttgaacaggaacttctttacttccggagtattgtttgcagggactttctctgcgattattccggctacttccgctgccacttccgcatcattcaaattggtgttgtacttcgccagagcggcatcgtacttgctctgtgtagattcgttattctccatggtcggataatttaggattattgatatgtcttgcctggtcgcgtttggttttcttctcgatgctgcgtgcaaatgcttcggtgatgtctacaccggtctggttggcaatgcagagaagtacccaaaggacgtccgcgatttcttcttcaacgttgtctttctctccttccttaaaagactggtcgccgtatttgcgtgccataactcgtgccagctcgccgacttcttcggtcaatacggccatattggtgagctcgctgaagtaacgtactccgtatttttttatccaggagtccacttcttgttgtgcttcttttaacgtcattattccttgttttttgtatccatacagatggtcacagggccatcgtttactaattctaccttcatatcggctccaaattcgccggtacctatctctttacctaatgcaaaactcaattccttgcagaattgttcgtacagcggaacggatatttccggttttgccgcccgtatgtaagaggggcgattgcctttcctggtagatgcgtgcagcgtaaactggctgattaccaatatctcaccgtcaatgtcgagtatggatttattcataacgccattctcgtcgtcaaaaacacgcaggttgacaatctttttacacaaccagtcgatgtcttccttgccgtccgtctcctctatacctaccaatatcataaatcctttgcggatggcggacttacaggttccgttgattgtgacagacgcatgcccggtacgttgtataactactctcatgttttagtcctaaaaaataattttgcaggttgcaaagttacgaataaattcgtgattgccgcggtgtgggacaagaatttgtattgaaggactatttgtctgtgaaatagtcctttatgattttcgctttcgcctcgccaatcactttgacaatatcttccgccgatgcttccttgattcgttttacgcttttgaactcctttagcagagcgttctttgtcttttctccaatcccttttatctcgtctaaggccgaagctacctgccgcttgctgcgcttgtcgcggtggaaggtaatggcaaacctgtgtacctcgtcctgtatttgcgtcagcaggcggaaaaggggagagttttgtttcagtccgatggtctgcggcgggaaaccgtatagcagttccgatgtgcggtgtttcccgtctttggcaagtccggcaatggggatatcaaggttcagttcgtcgacaacctcttttacggcgctcatttgcccttttccgccgtcggtgataagaaggtcgggcaggggagcgttctcctcgatagcgcgctgataacgccgttttacaacctctttcatggatgcatagtcgtccggtccttccacggtcttgatgttatacttccggtagtctttcttggacggctttcctttgatgaagacaacgcatccggcaacagggtccgagccttggatgttggagttgtcgaaacactctatccgcataggcagcctgtcgaggtgcaattcttgctggatttcctttaaaaggcgtaccgtgcgttgttccggattcagcttttccgcttgtttcagacggtcggccttgtattgtttaacgttaaggatggagagttcaagcaatttcttcttatcaccgcgttgcgggatggtaaagataacgtctttaagctccatgtccagctcaaagggcacgatgatttcgcgggaaaggctcttgtaccgttcgcgcatctcgataatgcccagtgaaaggagctcctctttcgtttcgttcagccgtttcttgtactcaaaggtgaaagcctggttgatagccccgtttgtgatatgcagatagttgatgaatgcggacttttcatcggtgtcttcctcgatggagaacacgtcgatattgtgcaatacgttgcttaccacttccgatttggaacggtaattttccagcagcagatacttttccttgattttctgcgcctcttcaaacttcatttccgccgcaagctcctgcatctgctgatacagcatccgctctatctcctgggtatttcccttgagtatttcctttatttcggcgatgtttttgaggtattcttcctgattctgcttgcctatgcaggggcctgcgcagttcttgatgtggtattccaggcatacattgaacttccctgcccggatgttttcgggcgagagattcaaattgcaggtgcgtagcgggtacaaatgcttgatgaggtcgagcactgcatacatggatggtatgtggctgtacgggccgtagtaggaagaaccgttgcgtatgattctccgcgtcttgaatacgcgggggaaatattcgttctgcacgcagatggacgggtaggtcttgtcgtctttcagcagtacgttgtaacggggtttgtatttcttgataagattgttctccagcagcaaggcatcctcttccgtgttgaccacgatataccggatatctgcaatcttgctcaccagtacccgtgtctttcccggttcatgttctctgttgaagtaggaagagacccggcgcttcaggttttttgctttccctacgtatataatcgttccctcggcattcagatattggtaaataccgggactttcgggaaggttcagaacgatacctttcaggtaatcatttgtttttagttcgtccatatcgtaagaaaaaggtagtaaagaaaaaggtggtaaagcaatacgctgccaagagcatgcggcgatacattctcatgcagcgatgtgattgctttaccacccggttgtttctttagagtgtcaataccgattctacatctacatctttgctgaatatctcctttccatgcaactctttcaattcgataatgaagtttacatatacctttttagggttcagtttcttcaccagtttgcaggctgcttccattgttccgcccgtagccagaaggtcgtcgtgcagcaatactacatcgtccggttcaatggcatccttgtggatttgtaccgtatctttgccgtactctttgtcgtagctttcttcgattgtttccgcaggcagctttccgggcttgcgcatgggtacgaatcctgcacctaagcgggtggcgagaatggggcccatgatgaagcctctggattctatacctaccactttggttatccctttatccttgtacatttcatacaaggtgtccgaaagttcttgcagtgccgacgggtttttaaacagagtggtcacatcgtagaataaaatcccggggatggggaagtcgggaatttcccgaatggtcttggcaagtgtttctttgctcataatcagtttatttaatacgtttattgaattctttgtttcacgtggaacgttgccccttatcgcccgcaaagcaccagcagtacgttgatgtcgctgggagacactcccggaattcggcttgcctgggctatcgtttccggatctatcttcaccagcttctggcgggcttcggtagaaagagactggatggaattatagtcgaaccttcctttaatctttatgctttccagccgtgccagtttatctgctatgattcgctcgcgtccgatatagccttcgtacttgataagtatttccgctgcttcgactatttcgtctcttctgtctgcaactttatcctgttccgtaatcttgtccagttcccgacggaaagcgctgacatgttctgccatgttttccaaggttacttgcggacggtttattaaatctaccaacttgcatccctggcggagcggggtagtgccgagctgttccagcaccgggttgattaatgccggtttcatcgaataactccgggtaaactctatgatgcttgtaacggcttcgcgcttgctctttaatagttcgtagcggtcttctttggcaagtcccagtttccaggctctttcggttagcctcatatcggcatcgtccatgcggagcaggatgcggtattccgcacgtgaagtaaacatgcggtaaggctcatcgacgcctttggtaaccaaatcgtcgattaatacgcctatataggcttcgtcgcgtgccagggtgaacggttctccgccgtggcagttgatatgcgcgttgatacctgcaatgattccttgtccggcagcttcttcgtagccggtcgttccgtttacttgtccggcgaagaataggttcttgattttcttcgtttccaacgtatgtttcagttgggtgggatcaaagtaatcgtattctattgcgtagccggggcggtaaatcaccaggtcgcggaatgccggaatctttttcagcgctgcaatctgtatgtccatcggcagggaagaagagaagccgttcaggtaaagctcctgcgtcgtttcaccttccggttccaggaaaagctggtgctgttccttgtcggggaaggttacgattttggtttctatactggggcaatagcggggccctatactttgaatctgcccgttgaaaaggggagaatccggcagcccttcacgaaggatgcggtgtgtttcctcattggtgaagcaggtccagcacggcagttgcttcaggtggcgtacgccgttgttcataaaggagaatttatggaagtcgttttctccttcctgaatctccatatcttcgtaatgcacgctccgtccgtcgatgcgtacgggggttcccgttttcattcgtccgtatgtgatgccgtgccgggcgatggattcggtcagttggtaagatgcgggttctgccatgcgcccgcccggaagcatggtgcgccctacgtgcatcagtccgttcaggaaagttccggcagtcagtacgacgcatttggcgcggaaggtcactccccaaacggtggtgagtccggttacctcgccgttttcaacgaggatttcctgtacggtgtcctgccagatgtgcaggttgggaatattctccagaatctcgcgccatgtccagatgaatttgttgcggtcgcactgcgcgcgcggactccacatggcggggcctttggagcggttcaatatgcggaactggatagccgttttatcggtcaccaatcccatatatccgcctaaggcgtctatttcgcgtacaatctgtcctttggcaatacctcctacggcagggttacaactcatctgtcctatcttattcatgtccattgtgataagacaggtctttgaacccaggtttgcggcggcggcagcggcttcacagccggcatgtccggcgccgattacgataacgtcatacttaaactccattcgttcaatctcttttaaaaccatgcaaagttactaaaaagttattttgtagccgcgatttatctcctttccttgtgaattcttaggaaatacctcgcgggtttctttccgttttgcctgtatgtaatcttctttcgccttgtatataatctcttattcgtttaaggaaaatatccgaaaggcaggttcttttcttcgtcccgcagttgcgggacggacggttgccggctgcgggcccggcagcccgcaattggcaaccgcggagcctgcaattggaaaacgaagaaagtaacgtggtaaagcggtattatatacggtgcgaaacaaagaaaagaaagagggaatggaacatttatctacgggattagcttcccgattgcccgtataaaaccttttcagacctcggaaatcgttgaaaaagtcgcttatatggaatttctgattattgggttaatgcattgacccatagtgcatagcctgtttttgagggtgacgaccgattgtttgtcatcacccttatcatgttggtcgtcacatccgcaatccctctctggtaaagggatgcgaggtggttagtgacgagtgacgagagattgtgcaaaaaaacgataggggggagagttgaactttgcttgccgatacgccttttgattttatcgcatggcgagcgccttgttttcggcggcttccatgatttcccgttctcccggtcctttgtcgttaatgccacaaaggtgcaggatgccgtggatgatgacgcggtacagctcccgttcgtagtcattgccggcaaactgttcggcgttggtgcgtaccgtatccaggctgatgaagaggtcgccgctcaggcggttgccttcgcagtagtcgaaagtgatgatgtccgtgtagtaatcgtgctgaaggtactggcggttcacttcgaggattttctcgtccgaacagaagatgtaggctatttcgccgattctcttgttgtaggtggcggcaacggctttgatccattccgttgtttcgcgcttcttgattgcgggcatttcgatgccgtctgtctgataacttatcatactatttccagtttttttaaaagaagaatatatagctgatgatgatagcggcgatgataccggaaaagtcggctatcaggccgcaggtgacggcgttgcgggtttttgtgatgcctacgctgccgaagtagacggcaaggatgtagaacgtggtatccgaggcgccgcgtgccacgcagctcatgcggccgacaaaagagtcggcaccgtattgcttcattgtatcaatcatcagtccgttggccccgctgccgcttaacgatttcatcaatgcagtgggcagcgcacctacaaactcggtgtccgctccggatagtccgacgatgtaaccgatgccgtttacgatgatatccatcgctcccgaagtgcggaaaacggcgattccaacgaggaatgccaccagatagggaacgatgcgtatggcggttgtaaatccttccttggcgccttcgatgaaagcatcgtacacattaatctttttccataatccccacaggatgaaaagcaggatgatggtaaagagaatgatgttggcaaccagcgtggagtaaacgcccatttcttcgcggcttacttgggtgaacaggtaaataagcccggagaagaacaggctgatgcaaccgatcagaataagaatgggtttgttcagcaggtttatccgttgcgcaatgctgacggcggtgacaccgacaatggtagagatggcggtagtaatcagcgtagggatgaaaatgtccgtaggctgcgcagcgcccatttgcgagcggtacatcatgatgctgacgggtatcagtatcaacccggacgtgttcattaccagaaacataatcatcgggttggtagcggtatcttttttcggattcagctcctgaagctctttcatggctttcagtcccatcggggtggcggcattgtccagccccagcatgttggcggaaaggttcatgaagatggaacccatggcggggtgtccttggggaatttccgggaagaggcggcagaacacgggactcagccagcgcgaaagcgcgtttatcataccgctgttttcgccgattttcatgatgcccagccataaggatagaatgccggtgagccccagtgatatttcgaatgcggtcttggatgagtcgaatgtggagttgacaagttccgtaaatatttccgtatctcccataaacaggagtttgcagagtgctacaatgaaggcgattacgaaaaatgctacccagatgtaatttaaaaccatgtgtccttactcttcttcttaaatattaatagttgctttcgttggcaagattccatacgttgaggaaggatgccttggttatctccacgactttttcccagttcagtaatgcggcgtggtctgacggctggtgatagtcgggatggccgtcggtgtgataccagatgacggggatgccggaacgggcgaacgaggcattgtcgcttccgcccacggggttgtcccagggacggtagtcgggttgcagttgcagtccgtagcgggtgatgtcccgtttcagccattcgccgaaggcaggatgggcggctgtgtagaagtagactacgtgctgcggttgttcgggcttgctgttacgccctatcatgtcgaagttgagataaccctttatctgtttgagaaacggacagtgctgtacgaaatgttttgaaccgagcaatcctttttcctcgccgtcccaaaaggcgaagataacatttctcagcggcttttctccgctgagggcaaatgcacgtgctatctgcaatacggcggagacgccggatgcgttatcgtccgcaccgttgtatatcttatcgtccgccagcgtttcgtctacgcccaggtggtcgaagtgagcgcctacaatgacatattcatcgctgcgcttaccgggaatgtatgccagcacattatccattttcagggaacggtgcgtgctttgtttcagtacggcaacggagtcggggtgtacctgccagcgtccgcgttgctgcctttccttggcgtatgcctcgaaaggctggtaatagccgttcttgtccaaagggcggataccggcttctttcaggcaggatacgatgtagcgggctgctacccgagaaccatgcatgcctgcttcgcgtccttgcagttcgtcatcggccagaaactccacaatggcttctgcggaagtacggttgatgctttgcaatcctttttcgagcggtgactgtgcatgtagcaacagggcggaaaacaggaaacaggcggttcctaaaaatactttatgcatggtgttccgtttttagtgactaaagtgtgtatctgttgcaaaattaaagataacttttcatagtttctatagatttggcgtatttttgtctgctggcaagataattcaagtacatgtaaatcaaacggtgagtgatgagaaaaaggaaaatcccattggcaggtacgctgcagaataatccgatttcaacggaagaaatagcggatattgccgcagatatccaaagggaattggagacgtatgccgatccggtaaaaagggaatatcttccccgtttcttcaagacgggaaagggagaatacggcgaaggcgataaatttctgggtgtagtggttccgaatacccgcacggtggcgaagcaacacaaggatgctccgtttgctgtaatggcggaactgctgcaaagtcagtggcacgagtgccggctttgcgctttgctgatgctggtggagcgttttaagaaaagcggtgaaaaggaaaggaagcttatttatgacttctacctttcgcagacggcacgtatcaacaactgggatttggtagacttgtccgctccgggtatcgtgggagaatatctgaaagacaaatcccgcgacgacctttatcgcctggcagacggtgtgttgctctgggaacaacgcattgcggtggtttctacttatacgcttatcaaaaacggtgatttcaccgatattctggcgctttcggaacggttgctgcaccatccgcacgatttgatgcggaaagcggtgggctggatgctgcgtgagatgggaaagagggataaggatttgctggtgcagtttcttgagaaacacagcaaggtgatgccgcggacaatgctgcgctatgccatagagaaattcccggaagaagaaaggaaggagtttatgaaacgttgaaagatttctttatctttgtccggaagcggagataagcggcatttcgatataaaaaagaatggattcattttattctgctctcggtttgcactatctttgtcgttgtatagattgaattttaatggaacaagaagattttaacatacgcgagcatcagctcaccagcaaggagcgtgacttcgagaacgctctccgccctttgaacttcgaggatttcagcggacaggataaggtggttgataatttgcgcattttcgtgaaggctgcccgtctcaggggcgaggccctggaccatgtgttgcttcacggtcctcccggattgggaaagaccacactttccaacattatagccaatgaattgggagtaggtttcaagattacttccggtccggtgctcgacaagccgggcgacctggcaggcgtactcaccagcctggagccgaacgatgtgcttttcatcgacgagatacatcggctgagtcccgtagtggaagagtatctgtattcggcaatggaagactaccgcatcgacatcatgatagacaaaggcccgtcggcgcgaagcatacagattgatttgaatccgtttacgctggtgggggccaccacccgcagcggtttgctgacggctccgctacgtgcccgtttcggcatcaatctccatctggagtattatgacgatgatgtgctgagcggtattatccgccgttcggcaagcatactggacgtaccctgctccacaagagccgcttcggaaatcgcaagccgcagccgcggtacgccgcgtatcgccaatgccttgctgcgtcgcgtgagggactttgcacaggtgaaaggttcgggcagcatcgatacggaaatcgccaatttcgcactcgaggcgcttaacattgacaagtacggactggatgagatagacaataagatactttgtacgattatcgataagttcaagggcggtccggtgggacttacaaccatcgctacggccttgggagaagatgcgggaaccattgaagaagtttatgaaccgtttctgataaaggaaggcttcctgaaacgcactccccgcggtcgtgaagtaacggaactggcctataaacatttggggcggagcctctacaatagccagaagacgttatttaatgattgacgcttattgataagcaaccggttagagagtataataaaacactgaataacgtggctggattgaaatcattggcaaaagaaactgccatttacgggttgagcagtattgtggggcgtttcctcaactatctgttagtgcccgtatacaccatggccttgtctgcacagtcggggggctatggcgttgtgactaatatctatgcgtgggtggcactgttgctggtgctgctgacgtgcggcatggaaacgggctttttccgctttgccaataaaggagaggacgacccgatgcgggtgtattccacaacattgctcagcgtaggcatcggtgcgctgacatttcttgcgctgggactgctgtttcttcaaccggttgccgactggctggaatacggagagcatccctggtacgtgggaatgatgatgattgtagtggcgatggatgccattcaaagcattcctttcgcttatctgcgctataagaaacggcccgtcaagtttgcagcgctcaaactgctgttcatcttcctgaacatagccttgaacttgatttattatgtctggatgaagggcgatgatgtggcgtatgccttcctcttcaatcttgtgtgcacttctaccatcatgctgtgcatgatacccgaattgcgcggtttcgcttatgtgctggacaggaaactgctgaagcggatgcttgcttatagcctgccgttgctggtgttgggcattgcgggcatcctgaatcaggtggcggacaagattatctttccctttgtctatcccgaccaggcgggagccaccgtacaactcggcatctatggagccgccagcaagattgccatggtgatggcgatgctgacacaggcttttcgctacgcctacgaaccttttgtattcggcaagagccgcgataaggacaacaagcaggtgtatgcgcaggccatgaagttctttatcatctttacactggtggcttttctggcagtgatgttctatctggatattctccgctacatcatcggccgcgactattggccggggttgcgtgttgtgcccattgtaatggctgcggaaatcttcatgggaatttatttcaatctctctttctggtacaagctgattgacgaaacgcgttggggagcttatttctcactgataggctgcacgattctggtggtgatgaatatctttttaatcccgaagttcgggtatatggcttgcgcatgggccggatttacgggttacggcgttgcgatgctgctctcttattttgtcggtcagaagaaatacccgattcagtacgatttaaagtcgatagggtgctatgtgctgttggctgcggtgctttatgtggctgcggaatgtgtacctattgaaaacatctgtctgcgtatgacgttccgtacgctgttgttatgcctgtttatagcctatattataaagcgcgatttgccgcttagtcaaatacctgttatcaatcgttttatccgaaaatagaattatttttatggaacagcctgtcaatcccaaccggaatgtatttgccgtcaagaacttcctgaaagagtatctcgatttgcgcaaagataaagacaatgaacttgccactgtagactccatccgtaagggtgtcgagtttaaaggggctaatttatggattctgatatttgccatctttatggcttcactcggtctgaatgtcaattttaccgctgtaattatcggtgcgatgcttatctcgccgttgatgggacctatcatgggagtggggctttcagtgggtctgaacgatttcgagctgatgaagcgctcgttgaaaagtttcctgataactacgctgttcagtgtcaccacggctaccgtctttttcctggtaagcccggttgccgaggggcagtcggagttgctggcgcgtacctcaccgacgatttatgacgtattcatcgcactgatgggcggtcttgcgggagtagtggcactctccacgaaggagaaaggcaatgtgattccgggtgtcgccattgccacggcattgatgccgccgctgtgtacggcaggttatggactggcaacgggaaacctgatttatttcctcggtgcattctacctttatttcattaactccgtattcatcagtctggctacttttatcggcgtacgggtaatgcacttccagcgcaaggagtttgtggataagaaccgtgaaaagaaggtgcggaagtatatcgtgctgatagctgtccttacgatgtgtccggcggtgtatctcacagtgggaattattcaggatactttctttgaaagtgcggccaaccgctttgtaaacgagcagctcgcctttgagaatacgcaggtattggataagaaaatccaccatgagggcaagcaccatgagatacgggtagtcctgataggtcaggaagtgccggaagcctctattgccatcgcccgcagtaaaatgaaagattataaactggacaatacgaagctggttgtgcttcagggaatgaataacgagtcgctggatatgtcgtctatccgcgccatggttatggaagatttctacaagaacagcgaacagcgtctggtggagcagaaacagcagatttcttctttggaaaaggacttggaacagtaccgtaaatacgatgaattgggcaaaaagattatccctgagctgaaggtgctttatccctccgtcaagtcggtttccatttcgcacgcgcttgagctgacggtcgattcggtacggatagataccgttacgcttgccgtcctgaagttcggcaagcatccggatgcccgtgaaagggagaaaataaccgaatggctgagagcgcgtacgggttccgaaaagctgaggctgattgcggagtgatgtccggatgcggtgaaagagaagcgtccggccgcacaggctgtcggtgtgggagtacaaaacgggcaggcaaacttatataaagttaagtagagaacgatatggttttgagatttgtagcagtggttgtttgctgcctttctgtgtgggtggtgcaggcggatgagggcatgtggatgctgggtaatctgaataaacagacgcgccgggcaatgaaagagctcggtttgcaaatgccggcagacaagctatacagtgccagacgtccctcattgaaagatgccgtagtgagtttcggcggtttctgttcgggggtggtcgtgtcggaagacggactggtatttacgaatcaccattgcggtttcagtagcgtccagcagcattcttccgtggagcatgactatctgaaagacggctttgtggcacgtaaccgcagcgaggaactgccgaatccggagctttatgtccgctttctgctgcggacggagaatgtaacgaaacgggtgcttggtgcggtaaagccggagatgaccgagccggagcgttccggtgcggtagattcggtgatgtttgccatcagtgaggaagtggcgcgtaaggactctactttggtgggaattgtagatgcgtactatggcggcaatgagttttggctgtctgtttaccgcgactataacgatgtccggctggtatttgcaccgccttcctcggtaggcaagttcggttgggatacggacaattgggtgtggccgcgtcatacgggcgatttctgcgtatttcgcatctatgccggtaagaacaaccgcccggcggattattcgccggaaaacgtcccttatcgtcccgaatacgtagcgccgatttctctggacgggtataaagagggttctttctgcatgacattgggctatccgggcagcacggagcgttacctctcttcgtttggcatcgaagagatgatgaacaacggcaatcaggcacaaatagatgtccggggcatcaagcaggctatctggaagcgcgaaatggacaggcgggacagtatccgcataaagtatgcttccaaatacgatgaaagctccaattactggaagaacagcatcggggtgaaccgggctatccggaaattgcatgtcttggaaaagaagcgtgccatggagcgggagcttcgccgctggatacaacagacacccggagaacgtgagaagctgttgcggttgtttcccgatttggaactggactataaaaatacccgtgaagccaaccgtgctctggcttattttgccgaatctttcctgaacggtcccgaactgatacaattggcgttgtccattttgaattttgattttgaaggggaacggaaaacggttgaggccaatctgaaagcaattgtagaaaagtacgccaatctggatttggaaatcgacaaggaagtctttactgccatggtgaaagaatatcgttccaaggtcgattctacctatttaccggagttttacggtacgattgccacccggtacggcggtaacgacaaggcctatgcggatagtttgtatgccgcttcggaactgactacccctcgcggattaaaacgttttctggagcgggacactacctataacatctatgacgaccctgccataaatctgggcatagacctgattggcaagatgtttgaaatcaatatgcagacgagagagtccgccatgaatatcgcccgtaatgagcgcttgctgaatgctgccgtacgcaggatgtattcatcgcgtaatttctatccggacgccaattccaccatgcgcttgagcttcggtacggtatgcggatacaccccgtttgacggtgctgaatacgattattataccacgaccaaaggtattcttgaaaaggtaaagacccatgcaggcgatgtggattttgaggtgcagccggaacttctttctttgttctccaaccgcgactttggcagatatgccggtgaaaagggagaaatgaacgtttgctttatctccaataacgatataaccggcggcaattcgggaagcgccatgttcaatgccagaggcgaacttctgggactggcttttgacggcaattgggaagcgatgagcagcgatatactctatgaaccgaagatgcagcgctgcatcggggtcgatgtgcgctacatcctgttcatgatagagaagtacggcaaagccggagatttgatacgggaactgaaaatcgtttccggaaaatagccggttatgcgattcccctgatgcggtcgtcgaaagcggacaatgccgctttggccccttcacccatagctatgacaatctgtttgtagggtacgtcggacacgtctccggctgcataaacacccggaagcgtggtgcggcagaatgcgtctgtcttgatttcaccggtcggtgtcgtttccaatgcgtcccggaaaggtgcgctgttggctgccagaccgatttgtacgaagataccgtccaaaggatagtcgcgctcctcgttggtgatgcggtctttgatgcggataccggttactttctctccgtcgcccgtcactcgggtggtttgtgaagaagtgaatatctccacgttgggaaggcttccggctttttcctgcaatacctggtcggcttttagcgtatcggcaaactcgaagacggtaactttcctgcagattcccgccaggtcgatggccgcttctatgccggagttcccgccgccgatgacggctacatgcttgccttggtagaaggggccgtcacaatgcgggcagaaggctacaccgcgtccgaggtattcggcttctccctctacgttcagtttacgccagcttgcgcctgtggcgatgattaccgcaggggctgtaaacgtttctccgccaccggagaaaacctttttctctttgccctgaagctctgctctttcaatcttccggtcttcaaaaatctctatcgggtaatgttctatgtgcgtcctgagtgcgtcggcaagctgtgaacctgttgtccggggtacggagatgaggttctcgatgcctacggtttcttttacctgtccgcctattcgttcggcaataatggctacgcgcaatcctttgcgggcggaataaacggctgccgaagccccggcaggacctccgcccaggaccagcacgtcgaactcccttaagacgggtgctgcattttcttgcggcaggctgccgaaggtatcttccagttttttcaggagttcccctaaagaaccgcgtcccacatgaagttgcttcccattggcgtaaacggacggtacggcttgtattttcagcgcatccgcttcttcctgaaagacggctccgtctattgtgtcgtgggtgatatggggatgcagcagtgctacggcattgagcgcctgcacaatgtccgggcagttggtacaggccagcgacacataggtttgcagatggattgggccttgcaatgccttgatgcggcggccgataccctcgtccgggagatttttgccctttccatcggcgtttagcacggcaagaagcagcgaactgaattcatgtccgcccggaacggcacggaattttattccggtttctttcccttctttcaggagcgtaaactccagtttgggctcatcggtttcggtcacctggcaggacagtttgtcggaacagctcgctatgtcattcagaaaatcaatcatctcaccggcctgttcatgttccggattgcaggtgatgtgaaaggtatagcgggcttccaatggttggaatatgctccgcacttggtctaatatagttgcttctaacatgatgatgcaggtttttaaatgttggagtataaaaaaagactatctcatttcttgtactcttgcaaggaagaaatggagatagtctttacatagtaatgtctatcgtatgggggtacgattaaatcttgccgactaaatcgatgctcggcttcaacgttgcaccgcctttcttccatttggcgggacagacttcaccgtcgtgagtggctacgaattgcgcagcttccaccttacggagcagttcgtccgcattgcgtccgatgttgttgtcctgaatctcggcaatcttgatttttccttcaggatttacaaggaatgtaccgcgataagccataccttcttcttcgatcatcacaccgaatgcacggctcaatgttcctgtcgggtctgccaacatcgggtatttaatcttgcggatgctttcggaagcatcgtgccatgctttatgtacaaagtgagagtctgtacttacggaatagacctctacgcccatggcttggaactggtcgtatttttctgcaatatccaccagttcggtaggacatacaaacgtaaaatctgccggatagaagaagaaaatggcccatttgccttttacatcttcgttagttactgttttgaaacttccgttttggaaagcctgaactttgaattcagggagttgagagttgataatcggttccataattatactttttaaaaggtttggtttttgttttaccggtgcaaagattgtgcagaccgaatgcagaagcaggcttgcctgattatgccgaggtgcagccgatctttgtttttcctgtttgcaaaaatatagcatttttctccggtagaacaaaaaatccgattgaaaggttttatgggccgatagacaaaatctatacgagtacctgagtggctttcagggagagcatttctttgggcactgccgctgttacctcttgggcgattgtatttaaaagcgtgttgcggataaaactccggttggtcagcatgatgatttgccgggtaggacaggggatggcaaaaggatgtaccagttttttctgcgtgccgttcagttgcaggacagccagttcgggaatgaaagtaatgcccttgccgctttctaccatgcgcataaaggtttccatgctgcccagatgataggccaactggctggcacgggctgccttcagttggcagaaacgctccagttggtcgcgaaaacaatgcccttcatccagcagccaaagctgttctcccgtcaagtccgaagtccgtatgacttcattgttgaaaagacggttttcccgcgcaatatacgtgtagaactgttcgtagaataacggtatttgccggaattcttccattcctgccagaccggctacgattccggcatctatgtctcccgtttgcagggctttcttgatgtcgttcgtcttcatctctaccacccggatatcaagctgcggatatttcttcatcaattgcggaaagaaacgcggcagcagatagggggctatggtgggaagtatgcccagtttgaaaattccgctgagcgaatgcttttcttcttctataatgttttttatacgatgggtctgaaccaacacattccgggcttgttctatgatgtgaaggccgatgggagtagggcacacaggctgctggctgcggtcgaaaatctttgtgtccaactcttcttccaacttttgaatcatggcgctcaaggtgggttgtgtgacccggcaatattcagcggctttggcgaaatgacggaactgattgacagcaagtatgtattccaattgttgtaaagtcatagaaacagggcttttgaatgttatatatagaatcgttctatgcaaagatagaaattatctgtttgacaagcacttatttgccgcttatctttgcaacaggaacaaagaaaaatagtatgaacttttaaaatagaaagattatgaaaactttagattacttacatttgaatgaaaagaaagttgctgacgtagtatcggcattgcatcagctattggcagactttcaggtacattataccaatttgcgcggtttccattgggatattaaaggacacgggttcttcgtgctgcacggcaaatttgaagatatgtacaacgatgccgcagagaaagtggatgaaatcgcagaacgtatcttgatgttgggcggtacgcccgaaaacaaattcagcgaatatctcaaggttgccaaagtgaaggaaatctccggtattacttgtggcggtgaggctgttgagcatatcctcgaaacttacagttatcttatcggtgaagaaagaaaagtgatagaactggccaatgaagccggtgatgatgcaacggccgacttaatgaccggttacctgaaagagcaggaaaaaatggtttggatgctcgttgctttcagtaccaagagctgtgcgaaataggagataaaaagcaataagataatagggtgataaagtgatgatgcattgctttgtcaccctattgctttgttacactgttatttatcaccttgtcactccatcatctttttagaataatgacggttacggctgaaatgatgagcaggatgcccagtgctatgcttcgggtaaacggctctccgaagatggcaatgcctacgcataccgccgttacaggttccatagctcccaatacggatgtcagtgtggagcctatgtttttgatggcgcgtaccagtgcaaggttggatattacggtaggtactaacgcaagcatcaccagattgcccaatgtggtgcggtccggaatggcctgtaaccctatcccggagatttccgttccggtgaataacaggataccgccgaacaaaaagacgtaaaacgtcattttaagccctttcatttcgagatttttcagttggcttaccgttaccaggtaaagggcatatcccaatgcagaaagcaaaacaatgaatatgccggaccaggtgacgcttcccgtaccgtctccgttggacaggaaaaatacgccggctactgccagtgcaatggccgccatgcgccacaaagatttcttctcgtggaagaatatcatcatgataagcgtagtcagcaccggatacatgaaatgaagggtggtggccacaccgctcgacatgaactgatacccccaaaagaggaatactgcggaactgtcgtaaaggcatgccagcagcagaagcggcaatatctccttacggcgtatgcggaaaggctgcttgtcgagcagcagtatgcctgccaatgccagcatggcgaaaagaaaacgatataatagaatagaccagaaacccattccttgctgcatggccgggattgtaaatagcggaatcaatccgaagctggcagaagacaatagtccatataaaaaaccgttgactttgttcacgtcgtttgcttatttctttttaggtgtccgttttgcccagccttcttcgctgaagtccggttctgaatctttaaattcgttattgccttgaaagaactgtttccaatcgtcttttttgccgcgtgccttggtataaccgcgttcttcgcgactgggcttgttctttttcttgtcggtagaggcatattcggtcttatcgctgcgtttgccggcaacctcgctgcgacgctcatccttgtagctgcgttttttgccgtcaaattcctttttgccgtagttgccgccttcgttcctgcgttttcctttgggagcgtctttcccttcttctcccgcaatctctacagaaaccttacggccgttccagttggcccggtttaaggcttttataacgttgcccgcttctttgtcttccacttcaaagaaagagaacttctgcatcaggtcgatacggcctaattcaacacgcccgcgggtattgttgttcaggaggctgatcagttcgttggggaagaagttgtccattttaccgagattgataaacagacgtttaaagcccggagttgccttgcgggcattgctgccgcgttcgccgcttttggcgctgcgttcactgccggtggcaatttctatttcctcacggtcgcgatagtagtccaggaagcggttgaattcgagggaaaccatgcgtttaatcaggtcttccttactcaaccagtccagcttgcggtaaatgtcgggcatgaaatcacggatttcatcctcatttacttttactttttcgagttcgtcaataaccttcagcaactgcttctcgcagatttgcttgccggtaggcatttctccctgaatgaatttcttgccgatgatgcgttcgatttcacgcattttgcctttttcgcgcaggttgatgatggcgatggatgtgcctgtttttccggcacgtcccgtacgtccgctgcggtgtgtgtagctttccgtatcatcgggcaggccgtagttgatgacgtgggtgaggtcgtcgacgtccagaccgcgtgcggcaacgtcggtagccaccagcagttgcaggttgcgtatgcggaatttctgcatgacggcatcgcgctgcgcctggctcagttcaccgtgcaaagagtcggcattgtaaccttcctgcatcagtttgtcggcaatttcctgagtttccttgcgggtacggcagaagatgatgccgtatatctgcggatagtaatctacgatgcgtttcagggcggcgtacttatctttggcatgaacggtgaacaccacgtgtttcacgttgctggttccttcatttctgcgtccgatggtgatttcctttgcattgtgcaggtattttttggaaatacgtgcgatttcgggactcatggtcgcggagaacagcagtgtgttacgctcttggggcacatctgcaagaatggcattaatgctgtccgtaaaacccatgttcagcatttcgtccgcctcgtccataaccacgttctggatggtggagagtgagacggtcttgcgttccataaggtcgagcagacgtccgggggtagctacgatgatgtgtaccccccgcttcagggcacgtatctggctttcgatggacgaaccgccgtacacgggcaatacccgcagaccgtcgatgtacttggagtaatcattcaggtcgcccgctatctgtaaacagagttcgcgggtagggcaaagaataagtgattggggtattcggttgttaacgttgatttgctgtataagcggcagaccgaacgctgcggtctttcctgttcctgtttgtgccagtgctactacatcattattttctcccaaaaggtaagggattacttcctcttgtaccggcatgggacacgcatatcccatttcttcaatggcgcggcgtatctccggcgacacaccgagctcttcaaatgtcttcattaaatctttgtatatctttatatttcaggtgcaaagataatgcaagccgggagcataataaaataaacttgtctgttttttatgccgaggtgcggtttatcttcgcatttggcgcaaagataagagttttttggcgattaatcattaattactgagcaaaatactccgtaacctttttatttcgttcttgcttagtccgatacctttccgcaggtaagtattcatgtcaccgtatcggcgttccgcttcgtctttggcagcgttcaggaaatcctcgcgtgcggagaaaagggtagtgatggcttcctgcgagcgtgcaggcaactgataagcgtatttggaggcgcttggaatgttgaagtaatcattgctcagccggtaatcttccatgattatgtcctcgtttattcccagtgcggcaagcaccagtgcggacacgatgccggtacgtcctttgccggaggaacagtgtatgactaccggataactgtttttatccaacaggatatcgaatatctgccggtattctttggtatattggtctattaaaatgcggttcatacgctctaccatgcggtagacggtgtcacttttgattttttcttcccgtatgcctttcagtatgccttccatatctcctgtggcaagcggaatatgcacgacgttgaaccctttttgcagcggagactgcctgcctatctccgaagaagcccgcaagtcgataagtgtcttgatgccgaggtttttgagctccctgcgtgaggaacattcaaggctgtctatctctgccgagcggtaaatcattccccagcgcatctgtttcttggtggaataagaaggatagccgcccaaatcacggaagttctgtacaccgggaatgttgatgttgcgcgtggcaatcttaacacgatatttgtcgtcgaacaaaagggtgtaataataacgtttggtcggatcgttcgtgacgatggtcattttcaagtccgagatatcggccatggccacgggaacatcttccggaatgaagtcaggatcggtcgaagcatatacttttatgttccctttgataagcggagccatttcccatttgacgatacagttccctacattattttcttcgcatacaacggatatgtgtggagctgtgccgctgcaagaaggaagcaacactgccagaacaagcaagttcaacagattcttatacataattcgtaaactctctaatgtcgtttacagcaaatatatggtttttcgttgcagattatacagcgtatatgaagcttttataatttttaaatgataatttatttttaagtgctggttggagaggagcctcaatatttgcatctctccgcaaactcgtttgacaccgaattgctgtagcttttgcagacttctgcggcaaattccatgccgtaacggataatctggtcccacttggcttcaccgattgtattcagatcgtcatagcggacatcgtatttcagcaagccgtaaatgatgcctgcattgaagttgtcgcccgctccgacggtacttacggctttcagtagcggtatgtcatattctttggagacggaagcggtgcggagcgcaatcttttccgctcctgccgtgcataggaaattgggacagtagaatttaatcttgtccttgtatatcttgtctgcttcgcgcaggttgtacatatagaagaaatcgtcctgcgagccgcgtacaatgttcgcgtattccagattttcaataatggtcggcgccaattttatggcctcttccttatgggatgaacgaaaattggggtcgtagtacacgatggctttcctttcgcgtgcctggtcgagcaactccaacactttctcgcgcagcaccggattcaatgcgtagtaagaaccgatgacaacaatgtcgtcctcttccagtttggggtatatgacatccagccgctgtttgggataatccttgtagaagatatattcggcatcgctgttgtcatccagaaaggcaagcgaaacgggcgatttcccatcaggaaatacgttgacgtagtccgtagagatatgattgtcacgcatgaacctgaggatgatattgcctacatggtcgttgccggtttcactgatgaaacagacaggaacgccggtgcggctcaatgaaacgattccattgaatacggaaccgcccgcaacggcagccgaaggttgctcgttacggaaaataatgtctaatatcgtttccccgatgccgattactttacgcataacgctcttgatttttctccgaggtaaccaccgtggtgacgtttggagtagtcttcaatggtaaatccggttttcttcatggtctgtactaccagaatatctcctataacggtcattaccgttgtggaagtggtaggggtcatgcccagtatgcagacttccttgggacttcctgtgctgagacatacatccgattcctgtgccagcggactgtccggatttcctgtaatgacgataaatttcagtttcggattcaggttatgcgccaactgtgtcagttcgacgatttcccgtgttttgcccgaattggagatgagcagcagcaggtcattctcctgcaggatacccaggtctccatgctgtgcttcgctgggatgcagaaatacggaaggaatgccggtcgagcaaaaggttgtagcaatattcatggctatttgccctgctttacccatgccggaagttaccagtttgccttttttacggtgtacctgttctacgataagttctaccgccttttcgtatgcgtccgttacagggatattcaatacggcctgcgcttctttctgcaaaagctcttgaatggatgctatcattgtctcaattttgatttatggattataagtctacaaatatccgtaattttccataaacggcaataagttttattgtatttttgtgccggtaaactgtttgtagcgtaagaatgaagaatttaacagaagaaatacagcctcgccataatcagcacacattgccgaacggcttgcgcatcatccatgaaccctccttgtcgaaggtggcttattgtggttttgcggtggatgccggaacacgcgatgaactcgaaaacgagcaggggatggcgcattttgtggagcatcttatttttaaaggcaccaggaagcgcagggcgtggcatattctgaaccgcatggagaatgtgggcggcgatttgaacgcttacaccaataaggaagaaaccgtaatttattccgcatttcttaccgaacatttcgggcgtgcttttgagttgctgacggatattgtattccattccactttccctcagcgggaggttgaaaaggagacagaggtcattatagacgaaatccagtcgtacgaagacaacccgtccgaactgatttttgatgattttgaggatttaatctttcgcgggcatcctctgggacgtaatatcctcggcaatccggaacagttgaagaagttccgcagcgaagatgcggcggcctttacttcccgcttttaccgtccgggcaatatggtgttctttgttttaggcaatatggatttcagacaagtggtgcgttgggcggaaaaactattggctgatattccggctgaggctgtcgataaccgtcgtacgcccccgcctttatatgttccgaaaaatctggttttacacaaagatacccatcaggcgcacatcatgattggcagtagggggtacaatgcgtatgaagacaagcgtacggcgctctatctgctgaataacatcctcggaggtccgggcatgaacagccggctgaatgtggccttgcgcgaacggcgtgggttggtctataatgtagagtccaacctgacttcttataccgataccggaactttctgtatttatttcggttgcgacccggaggatgcggagctttgtacccgccttgtgtataaagaactgaaacgcctgcgcgatacccggatgacatcttcccagtttgccgccgccaaaaaacagcttatcgggcagataggcgtggcttcggacaataacgagaacaatgccctcggcatggcaaagaccttcctgcattacaataaatatgaaacagccgaagccgtgttccggcgtatcggacaactgactcccgaaattctgttggaagtggcaaacgagatgtttgcggaggattatttatcgacacttgtttacgattgacggccttttctgttgctgaactcaggtgttgaagcagggattgttatgccggactcttattgaatttaattcgttagacggatgttgccctttcgtcagacatccgttatcttttcgtcagacagttgttgaacgaaagggtaacaactgtctgacgaattaggatgtatggtccggctgcttgtttttggaatctccctttactaaaaatgccttattcccgcttattctcttcaggctgttccaaccgcttcctgctgaattcacagccgcagtacagttggttatagaagtcatactctttgaggagctggttgcggcggtcttgcaatccgcctttccgccagttctgttcccaaaagattgtaccgggataaagggcggctgcccgttttcccgcttcgtttatctggtcgaggcttttccaacgcgaagatgcgagggtagtggtaaagacagagaagccgtgttcggaagcatagcgtgccgtttccgtcaggcgtaatgtaaagcatttcaggcaacggctgcctcgttccggttcgttttccagtcccagcattgtgttccgccagtgggtataatcgtaatccgcatcgatgaaatcgaggttttgggacgttacgaaacgaacggcttcctgctttcttatctcatattcctcttgcggatagatgttgggattacaataaaacactgtcgggcggatgccgtttgccagcaggcattcaatgatggcggaggaacagggagcacagcaggaatggagcagaactctgtcttcgccgttgggagtttgaattttcaacatagtcatgaagtattttaaactttcagttttattttgcctttcaccagcagtcctgtcaactgtacgatgatgatggagaagacaagcgatttgagcagtcccggtacactgcttcccaatgcttccggataagcccagccggctaattgctggacggagtaccatatatagggaagaatgtaacaagtgagcgttgccgttcctgcgggtttgattatatcgaaccggttggttttgccctttacatcggtcagccaatagaaaaagccgaataacgggaagaaggcggcaagacaataaaacagccaggacggggtagcctgtatcttggagataatccagtatggatgcgaaaccagtgcaagaatcaacatgccggcaccaaggatgcagagcataccgatgaatttgcccgggtgttcgcgattggcgtagcgttgcatgagcaaggaggtcagcaggcccgacattccgaatgcgtgcagcgtccagtcactgggaatgaaaggcagcaacaggatacggcttccgtactcttccgggataaggccggaatggctgattacagcgagcgttatcactgcaaaccatgcaaccgcgtttttacgcaggctttcgcgggtgaacagatagataccggcacatacggcatatgtccagcctataagaccgaggattccccaccaacttgtatggaacggtttcccgttgaggtctttataaataaccagcgttgcaagcaataccacgcctgccactttcattacggtgaaaagggctttttttgtaccttcggcctttggatatactccccatgtcaggaagaaaccgattaccataaggatagtaaaccaggaatgggaaagaccgccttcaatgccgccgctgttaagcgagaacagccccatggcaatgagcgccaccgtacgccagaatatatgtgcaatgacctgtgtggttgtatcaccctttttataacggttctgtatggcaaaggatactgacatgcccatgcagaacagaaaggccgggaagatggtatcggaaaatcccagcatatcctcatcggcagcggcgtgcatcagccagtgaggaacattcttcaaaccgggaatgtcgtttacgaagagcataaggaacatggtgagtgcgcggaatacatctaccgcagccactcgttggagtgttaagtttttcatgataaatctgttttgggggttcaaggggcaaatataggaaagaatttctcaatatggggtatcaggttataaaaaagccattcaatcgcagtatcattgcagttgaatggcttttagcacgtttttaaaggaattccttattcaaacaaggatttggcgattcccatttccagtcctctcagctctgccaatcctctcagacggccgatgcaggagtaccccgggttggttttcttcttcaagtcatccaccatctggtgaccgtggtcgggacgcatcggaatggaaaccttacggcgctgctgcagctcgaggaaagccttcatcacatggtacatatcgacgttgccttccagatggttggcttcgtagaagttgccttcctcatcgcgttgcgtgctgcgcaggtgcacgaagttgatgcggtcgccgaactgctctatcagggcggcacagtcattggcgctgcttacgcccaaagaaccggtgcacaggcacagaccgttgctcttgttgggaacagcgtcaatcagagcctggaaatcggcgccacagctcatgatacgcggcaggcccaggattgagcagggcgggtcgtccggatggatcaccagctcgacgccggcctcgtcggcaacgggacagatttcgctgaggaaatatatcaggttggagcgcagcttttcgggggtgatatccttatagcggtcaagctctttctggaactgctccaaggtaaagctctcttccgaaccgggcaggccggcaatcatgttgtgtaccagcaactgcctgtcgtcttccgtcatctgctcgaagcgggctttggccctggccttttccgcgtcggtgtaatcggcttccgcaccggggcgcttcagcaggaagaggtcgaaagcgatgaaggccgcgcgttcgaagcgcagggcgcggctgccgtcgggaagctcgtaggcaaggtcggtacgcgtccagtccagtacgggcatgaagttgtacgtcacgatgttcacaccgcatttgccgaggttgcgcaggctttccttgtagttgtcgatataccgttggaaatctccggtctgcgtcttgatgtgctcgtgtacgggtacgctttcaacgaccgaccagcggagacctgcggcttcaatcatctccttgcgtttcatgatttcttccaccgtccacacctcgccgttggggatgtggtgcagggcgttcacgatgccggtggctccggcctgtctgatgtcccataggctgacggggtcgttaggaccgtaccagcgccaggtttgttcacaaagtatcatattgtaatggtataagtttataaagtatatgtctgtctattatgaatgaggatgtaccaaaatacacttgatgatttcttttttaggcacggattacacggatagacacggatttattttatcccttttccgtgaaatccgtgtaatccgccctaaaaaagaaacaaatagccagtgagttttagttttggcataccctcacggatttcatcagatggagaatgcgtcgaaaccgccgtccaccaccgagagtgccccggtcacgaagctggaagcatcactgatgaggtagtggatggttccgaacagttcttccggttcggcaaagcgtccgcatggagtgtgggcgatgatggtctttgcacggtctgtgtacgaaccgtcggggttggtgagcagcgcacggttctggttggtgagcaggaatcccggaacaatggcgttcacgcggagttcggggctgaatttggttgccagttcggtcgccatatagcgtgtataattgccgatggccgctttggcggaaccgtaacctaccacgcgcgtcagcggacgaagggcggattcggagcagaaattaacgatggcgcctttcttgttctttgccatgacgtctacgaacaccatggtgggaagcaccgtaccgaagaggttcaggtctaccactttgcggaatgcgtccacatcgaggtcgagcacggtcttgtccggagcgatggtagcgcccggcatgttgccgcctgcagcgttcagcagcacatcgatagtgccgaagtgttcgaggatggctttcttgttttcttccagcacttccttgttcagtacgtcggttacgagaaacagggcttcggactttcggttaagttcggcttccagttccctgcctgcctcttccacacggtccagaatcacgattttagctccttgctcggccagatagttggcgatgttttttcctaaaatgccacaaccgcctgttatgacgattactttgtttttaatgtcgaataagtttttcataatttatgtatttaatgtcagttcgatattattcaataaatatcttattgaataataggaatatagagaaaaagtattaaatttatagtatttaattataacatttaaacgattaccgctatgttcccaaagtccaaaattacgcaaaatctctggaatatccgccgaattgcagcagattaacgcaacaggatttgataattagggagttagaagaaaaacgcagaagttgggcagacagttgaaaaccgtcttaaagcagattaaagcaaaagaacggtttcctaatcattacccgatgaaagtgcagatttaacaatccctgtttcattttgcggcgttctgcgcagctttgcttatcaataggtaactcgttgatttatagttttgcaaccaaaaagaaacgagtatggcaagaagcacattcaaggtgctgttctacgtgaacggcagtaaggaaaagaacggaattgtccccatcatgggacgagttacaatcaacggaacggtagcacagttcagctgcaagcgagctatcccgaaagagctttgggatgccaaagggaacaaggcaaagggcaagagtatggaagcgagggaaaccaatcttgcgcttgacaacatcaaggctcaaatcatcaagcattaccagcgcatatccgaccgtgaagcctatgtaacggcagaaatggtacgcaatgcctatcagggattgggcggtgagtatgaaacgttgctcggtgctttcgacaaggaaaatgaagtgttcaagaagcgtgtcggaaaagacaggggcagggcaacctatatggcaagggtacgggcaagaaaccatgtggcggcattcatcaggtcacattacaagcggaacgacatctccatgcctgaacttacgcccgacttcatcaaggagttcgccgtgttcctttccaacgaagccggactgcacaacggttcgatatgggaaaactgcatgtggctgaaaggtgtggtgatgcgggcgcatttcaacggacatataccgaggaatccgtttgcccagttccatataagcccgaacacgaaagagcgtgaatatctgacggagaatgagttaaaaacattgatggaatttcagttcaaagaccccaagaactcctatctccgtgatatttttgttttcgccagttttaccgccctctcattcgtggatataaaggaattaagcaacgaccagattgtggaagtgaacggtgagaaatggattatttccaaacgacacaagacgggtgtaccgtttcaggtgaagctgctggatattcccttgcagataatcgagcgttacaaggcttttcaggaaaacaatcttgtattccccaatctcaactattggtcaatatgcaagcgtatgggaaagatgataaaggaatgcggcatcaccaagaaaatcagctttcattgctcaaggcacgggtttgcgaccctggctctcagcaaagggatgccaatcgagagcgtcagccgtattttggggcatacgaacattgagaccacgcaaatctatgcgaagataaccgtgcagaaattggataatgacctcacgatgctgggcgacaaactgagcaaatcattcggaaacgtgaaaatggcagggatatgaaacgggaaataatcacaacggacagctatggtagaattaccataccatccgatacaggtaatatatggatgaatgaaatggagctggtagagctgttcggggtaatcgccccgacgctccgtgccgccattcgtgccgtgtacaagtgtagagtttttaatcctcttgaagctgaaaaacgtatcaagctgcccaacggctattatgcggacatgtatgccttgccgatggtggtggcactcgctttccgcattgacacgtcaggtgccgcaacggttcgcaatgcactgctggaaagattgtgccgccgaaaagaaaaacaagtcctgctggtgtcaatgaataacaggatgtcgaatgaatgttagaatgaactttttatgttcagccatttgatgattaacggtttaatctgacgtagtgacgacatgaagtcattaaatccgttaatcagtgcgtcagtcaatctgtaattatctgcaacaaccagtccccgaagaagtgcatattccacgacttcgggcttttttatctccttttacctgaaagagccacccgtttatactgcattttctttttgcatgacctgttttgcgccgttccgcatagatttgcgtatcaagattttaccgacacttccgtagctttgcaatcatgtttaacccgttgccgacagaatgtaggcagcactaaaacctgtatcaagaacatgaagaaaaaaagaaatcatttgcgtaggtacaactctctacaagattgtaaatcgggattgtcattattcaccgataagaggaataggacgttactacacaataaacaaaacacaactggaaaaattctgatattttgatgaaatgatgaaagtatatataaacataaagagaaacagcaacttacgtcttcatcaacctttcaacaagagaatcgggctgatgaaaagagaaaggacacaccgcactctacatcacttttcttttggcgagcggtttgatgaaacaatgatgaatgtatatcattatggttatcagtctattatcctatcaactcatcaattcatcggatttttatccaccaacaagtctgccggacatacgaacggaaggaaatgccactatccgcaggctggtctgacatccgacctacctgctgtccgaccagccgacaaggaaaggcgtatcatatcaaaaggtctgcctataccgctggtactctcacaggcttttgagaacagaaaagccatagctcattagggcattttctttacgcagtgcaagcacagctaaaaacgccccaatgagccaacggggttacacccctctggacacccccgtttgccatgcggcatgaccgcagcagacgggaaccaacaaaccaatttgtcaaacctgaaaacgaaaaacaagcatgggatatataagcattcaaatcaacaaagcgaaaggctcggctgacacgggcgcatccgaccacatagaacgtaagaccatacccaagaacgcagaccctacacgtacacatctcaaccgtgaactggtggagtttcccgatggagtgtccgaccgtaccgaagcaataagccaccgtatccgtacggcaggcatcaaacgtaagataacccccgaccaagtacgggcaatcagaatcgtgctttcgggtacgcacgaggatatgatgaaaatacaggacgagggcagacttgacgaatggtgtgatgacaaccttcaatggcttcatcgcaccttcggcaaggaaaataccgtttcggcagtcctgcacatggatgagcacacaccgcacattcatgccactgttgtaccgatagtaacaggagagcgcaggaaagccaagaaaaagcagacggaaggtaaacgctcgtaccgcaagaaagccaataccgtgcgcctgtgtgccgatgacgtgctgacacgtgataaactcgttgcctaccacgacagttacgcaaaagcaatggagaaatatggcttgcaacgtggtgtgcgtggctcggaagcacgccatacgacaaccgcccaatactaccgtgatttgaaacggcatacgggagaactggaagccaacgtgcagcagttgcagaccgaacagcgacaggcggaacaacagcttgacgaagtgaaacgggaaatcaagtcggagaagctggaagccgccaagacggaagctaagaccgcacttgtggcaaaggtcggctctcttttcggcagcggcaaactcaaggagttggaagccgacaatcatgccctgcaaagcgaggttgcagcccgtgacgagagaatagaactattgcagcaacagattgagtggcagcaggaggaacacaaccgccagcttatggaaatgcaagccaagcatcggaaggaaataacggacaaggaagcggaacaccaaaagaaggtatcatttttgaaatccatcatttcaaaagcccaaacatggtttccgctgttccaagaattggtgtatatggagaagttctgccttaaagtcggtttcaacgagaggcagaccgctacgctcatcagtggcaagccgctattctacgagggcgaactctattcggaggaacacaaacggaagttcaagaccgagaaggctggcttccaaatggtgaaagacccgaaagacagctctaaacttgcacttgccatcaacgggcaattgattggtgaatggttcagggagcagttcgataggctatacgcatccatgcgaaagactgtcatatcacctcgaagcaggaaaagtcttcgacaataagagttaatttgcttaaacctaacgggaaaggaatagtctaataattgattaggttattccttttcgctatttttgtcatattatcaatgtatcgtgtcatgaaaagattcttcgccttcatacttttacttgcgaccgtctgtgttgtccaagcacaagaaaacaccgttcagggagacacgcttgtcttattggaaaacaaaatctggcgggcaaaattgccggacgaaaaacaatatgtcacggaaatggagtttcgcgaccatgtttggaggtctacattcttgtacaaggggaaaacagacacgattgaaacctcctacgggatatgcggtgataccatcaaaacgtatgaccgtaaacaatataaaatactcgaactcacagacagtacactggttatcctttacttgccggaaaggatgacaataggtgttggggcggtgaaatacatcaatatcgttaattcgcctgcaaagatgcgtgagaatgaaaatcggctggacagtatctggcgcaaagaggacatctggaacaagggcattgcctcaatatccggaaagccaatcaaagacttgtcaaccatagagcctccccgatgggcgaaatgggattacgatttggagaaatattacacttcccaaatggtttatcccgaagagctattgaagaagaaccaagccggatattccgtagttatgttctctatcgatacattagggttatcgcgcggcattaatatattgaccaccatacataaaaaattcgacaaagaagttatccgactgacaagggaattgccgcattgcttaccatgcagggataaggacggcaagcggatggaatgtttctatacggtgtatgtgcctttcttgccccaacactatagggataggataaaggcggacagcattgcggaagaagaattgaaacagtgcttcgttgaatgggaaacagtcgcttatttccaagaagcgaagccgtggtctgcacaagagtatatcacccaacggctggtatatgacccagcgctgttgggggacaagaagcaggtgagaggcatctatacggtgcggattaactcgtatggggaagtatatgaagccaaaaccctgcgaagctgtagcattgaagattgggataatcaagtattgaacatcatcagaaagatgccccgctggatgcctaccatcaattactacgggaaaggagaatatagggaatctgtatggactatacctataatttttaagaaggacaggtgtttgattgcccacacaactgaagaacgtcttgaggtcgatgtccctatatgctatttgaatgaacaaggcgataccattgtgccatacggcaaatacaaattctgcgaaacagacactatacgggacatcggttttgtgtatgagaacaagcaggacgcacggattgtttgcataaacaatcaaggccaagaattgttctctgtgttcaaatgcgataacggacccgattatatccgtgaaggacttttccgtatcacggatgagaacgaactgataggttttgccgattctttgggcaatgtagtcattgaacctcaattcaaatttgctttcccattcaagaacggcaaagcaaaagttacatttacaggagaagagaaagcgatatttgacggagagcatcgcgaatgggtaagtgataaatggcaatatattaacaagaaaggagagattatacaatgagaactataattttagtagcaatgttatcaagtgccgtttgcctgagttgcaccaacaagcggcaacagttccagccggaagcaacaccggacaaagaattggctatcattggaggaaacgatacggttacaagcatccaagttgtatcagcggataaagacaccgtcatctatgatacgccagagtgttacctttggtatgtcgaagatttgtcggacaagtacaaagacaaaccagtttccatgtggacggaatgttctgtttatggggagaatgtacaaatcgttaatgtgttcgttgcaaacccgacacctgtttcgctgatgtatggaagaggttggaaattagaacaatggaacgggaaagaatggggtatagctaaaacaaaaggtgacagaagttggtttgatgatgggtttaacaagcaaaaagcacctttattgtattgctttcgtttccccgtcggcaggtactattatcttcccaaagggaaataccggatatgtaaatcgttctccgcgaaaagagagtatatagaattaagtgcagaatttgaaatcaaatagctttatgaaaacaagattatcagtattcattatcagtctattggcaaccttttccttgcaagcgcaaaccaatgaacggtacattgaagtgacaggtacatcggaaatagaaattgtacccgacagaatccattatctgattgaaatccgtgaatacttcgaggaagaattcgacgggaaatcgaagcccgaagaataccgcaccaaagtgcctttggcagagatagaacaaggattgagagaagccattgcccaagcaggcatcccacaaaatgctatccggacagaagaaatcggcgattattggcggcagcaagggcaggacttcttggtttccaagaagtttgatattacactgaccgacttcaatcagataaatgaaatcgtcaagcacattgatacgaaaggtatccacaccatgcgcatcggtgaattggagaacaaggatatacttgcctatcaccaaaaggggaagattgaagcactgaaagccgctcaacggaaagcaacctatttggtggaggcgttgggtaagagactgggtaacgtgatacgtattgtagaagaagggagcagcaataatatgttcccgtttgcacaaagcaatgtcctgtcatccgatgcttcttcattcgacaacttccgcaccatcaagaaaaaatattccatgctggtacgttttgaaatcattgattaaatgtaaggcggacgaaaggaaaatgccatattcttcttttcgtccgctttatttgtgtatatttgcatccgtaagagttacccaaacaagcaaagcgatgcagaccacggcaattagaacggttgccaaatcattaccccaaaacaaggtaatccttctaacttgtttaatatcaaatagctatattccttatacagatttacagaaatttattatatggcagatgatttctgtaaggaatttgcatggtgacaagaaaaatatatggtaaaagacagtaaccgcaagcattgtaacaaacagaaccggatgagtgatattgagattataaccattcttattttatttcatcctggtgatttcagatgcttcagcccttattataagggggatgcctgtaaacgtttgaaacagttgtttgcatgtttagtttcctacaattgttttgttgaactgagagaggaagtgttccatgaactgcttatttgggttcaagttgtatctgattatcaatgataaggaggaaattcttaatttcatgttcacttcgggaaatgcagatgaacgtgaacctctaaagcaaagtaagttcttagagaatataaaaggaaaattatgtgttgataagggatatatcggacagaacttgtttaatttgttcgaggtttttccatagtgaagaggccaggatagtggcgaagacggataaatcgtagctagcagcataacgtgccgtttctgtaagatgtaggttgaagcattttaggcagcaattgctacgttttggttctttttccagtccgtggatagctaccagctaaccttcgtagtcatagtgagcattgatgaaatcaagattttaatctgttacaaaacggattgcttcttatttctcctctcttgtaaatattgagattgcggtaaaacacagtagggggtatgttgttggccaatatgcactctatgatggcagaagaacagggagtgcagtaagaatgtagcaataccctgttttctgcgttgggagtttgaatttgagcatatcgaaaatttcctctctgtgggcaaagatacgtttttatgtattagaatttacctttaaggatggtttcatttgtagaaaaattttcttttacagttaatgttacattgttaccgttgaaatgaaatgtgatgtcaagagcgctaatccaatctacataatgtacttttagctgtaagtcgtctgtcggtagccatgcataactacctgctacgtggaaagtcttttcaagcccgttaaagctacctacaggtgtaatggaatagggtgggtatgcattgattgtacctgttaaccactgtttgtaaccaaagggtaggatatggcttgtcccatttttatcatcaattttcaaattcacttcttttgggccgaataataaatgtagatgttgccagccgtatcggttcgtttcaagggtaatggttcggttgacataagcagttgccaatggtgattgtttttttccttgtactgtgggaagtgtatagcttatttgcttcttttttaatcgagcataggcctttcctggtataagtgcttggttctttatggcagacagtagtttgttccatactaatctgcgctgattacgaccgtttattagcgtacattctgtaatgacaactaccatgtcttctttcggcatgatgagtacgtattgccctaatgcgccatcggcccgtacagcaccaggatagtcgcacagccacatctgatagccatagtcttcatctcccgcttccatttgcttgcttgtcatttgttttatccatgatgacgatagcagttgtttgcctttccacttgccttgatttaggagtaatagaccgaacttggcaagtgattcactttgtatgtgtaggccccatccacctgtatgaattccttctggactgatttcccatgcaacttctttgatattcattggattaaaaagctttagtttcaaatagtccaacagtgtcatgccagttactttttgtataatagcagaaagcacataggtactgatagaatcatattcaaactgcactccaggggttttcacaggtttggcaagaaaggtggataaccagtttgtacaaacgttgcgcatattccaatcgggtgtgataccagaagtcattgtaagtagatggcgtacagttatgttagataagttctctgaaacggagtccggtaattgttctggaaagaaagaaacaacgcgatcagtcagtcttagacggttatctgcaatggctaatcctacggctgcgcccacaaaggttttggagcaagagtacattgtatggcgatattcaggtgcgaaaggagttggataaatttcacctatcactttgccatgacgtagcacaatgacactatggatgtctgtgtgtggtaaagctgtcaaggaatcgaatagcgtgatgactgcttcggatggaacaccttcggcttctgggatagagcgttgtaattcattggtttgtgccaataaagatgtatgcacaagcatacatagagtgagtaagacaagattgattttcatgatgttaaattggggtatgttagttttctattgaaaaacctaatttttgtaatcctttttgtatgtcaggatggctcatgaataatttccatagcaatccgctgcgataattttctatcataactgcaataggcccttggtctatggcaaggtaacgttgtgggtaccaattgtccgtctcgctgaaagcatcgtagaatccatatgggccgaacactttttcacccatttcatagagatggcgcattacttgtagcgaatactctggggtatagacaatggaggagagggcagctgtaggagaaattacccctttgtcatcgtgctcattgggtgcatgtgccgcatacccgttcacggagtaactagctgtcagtccccaacagtcgctaccaaatcctttatggcatttaggattgcggatgcagtaggcccggttggcaagtgtcaaatttttcatttcattaaagtaatcagagcagtatttgtcttttaattttgtggggttgaggccaaggaaagagtattgtgcccaaaaaagaggtccggctttggagtcttgataacgtaaattcagttctatattttccactttgtgaggactgaggatagctccgttctctgcccatccttcgtggtagacttttggtggtattccgtgcgttggcgaggcggctgcaagtatgtacatgatgagacattcgttgtaaccatgtatagggaagttcatctcccatgcatattggggactccagtgccaatagagaacattttgtccgttttgtcggtagaaattccagtctacttcacgccatagctggtcaatacgtgtagcaagtgaaagttctctttctgtcagagccttttcagttggagtttgtcttgagctgtctttgttcacataatattgatgtacagttaggagggcttgcatgatgaaagctgtttccacaagatctcctccgttgtctttttgtccgaaaggttttactttaccagtgtctccatgccaccaatgaggatagactccttggaagcgatcggctgtttcaaggaaggtgatgatgcgttccatgcgttttaaaccttcttcgcgggtgacataaccacgatcgatgccagctaatattgccatgatgccgaaaccacttcctccggaagttactatattttggtcgttctcaggatagataccgtccatgtggatacgttcgcgtgcaagtccgctgttgggttccgctccttcccaaaagtagcggaaagtgcggtgttgtacagtatccagcaatgcttcgtcgctcagttggtttttggcttgcttagctgtaatatttgtacattgggagaatcctaataataggtagcagaataaaagagaatataggatattcataattatttgaaagctaatttgacaagtataggatagtgatcagaaagaaaaccattattgggctcgtcctgaatgactcggtaacggtttacttcgatattatcagtagtaaatatataatcaagtagcgtgcattcctcttttgttaagcggccgaagtcgtggaatgaccaagaagggccataagttacatttgcagtttttagagagttcttcatgccattttcttctaacacttgtagtggtgtttcatcaggagtacagttgaaatctccggtgaggatggcaggtatatgcggagcaatttcttttattttttgtacaatgagtcgagcactttctttgcgtgctatttttccgtcattgtcaagatgggtattgaaaaagacaagttcctttccatttcttttttcttttaatatggcccaagtagtgatacggttataagacgcatcccatccttttatacctatagaatcaggatgttcgctgagtgcgaaattaccgttttttaggagagtgaaccgatttggattgaagaatatcggacagtattcaccggcttcttttccatcgtctcgtcctacgcctaaggctgtatactgaggaagaccctgtttcaggtcttccatttggttatgacatacttcttgcatacctaatagatcgggatgatagtaagtaatcatttgataaacattctctttacggtacttccagttgttggcactgtctgaaggggcatccagacgtatgttaaatgtcattacttccaccgatttgtcggtggaagtatactgatttttgcaacaacacagtgatagaagaccactgaagcagagtagaaaaatataatgtttcattttttgttattttaatgtcaatcttgcagtttttgtagcctgactacttccaccaatgaatatatcaaattcacccggttcggttacttgcttcaggtcatagtcatagaatcggagcaaatcagctgtaattttgaaagaaacagtcttactttctcccgctttgaggaatatttttttaaatcctttcagttcgcgtactggtcgggtgatacttcccacaagatcccgaatgtaaagttgtacaacttctgctccatcgtatttcccactgtttgtaacttggattgtagctgttattgttttgttttgtttcatggttggggtgttcagtacaatatctccatattggaaagttgtgtatgatagaccgtagccgaaaggatagagcgcatcattatctacatccaaatagttgctgcggaatttttcgaaccatttcccattttgtagagggcgtcctgtgtttttatgattgtaaaacaaggggatttgccctacatttttagggaaagtcatggtcagttttccactaggattgacatcaccgaataatacatctccaattgcataggctgcttcacttccaccgaaccatacattcagtatagcgggtacatttttatgttcccaggtcagtgttaatggacgtccagtaaaaagggtaagtatcacgggcttacctgtcttcagtagggcttccaataaagttcgttgtacgtctgggaggttaagattagtacgacaggaactttcaccactcatttcggaactttcgcctaaagcagctacaatgacgtctgcattattagctactttcagcgcttcgtctagcatttcttggttcgtccgctggtcgcgattcagcgaacgcccgaacatagtagcgcgctcttcataagctgcatcgtttataaggttacttcctttagcatggattacgttcactttgcctgccaacatttccttcagtccttcatataaggatgggtagtcattgagccgggctgctacgctccatgtacctggcatattgctacgagtgtttcctaatggaccaataacagcaactgtaccttctttcttgagtggaagaaggggagaaagggagtgggtagtcgtgccgtttttgtctattttattaaaaggttcgttttttaatagtacgaaactttcggcagctattcgccgggcagcctttcgatgagcttttgtaaaaatgtcgcgtgtagggcgttttaaatcacagtatttgtagggattatcaaacagccccaatttgtatttggcttcaaggatacgtcggcaagccgtatttaaggtttccatacttatttttccttgtacaagagattgtttgagagtccctatgaatccttcacttaccatgtccatgtctacacctgcattgagggcccgtgcagaaacggtttgtagatctcctatgccatgtgctaccatttcggatataccagtgaaatctgttacaacaaatccattgaagttccattgtcgacgaagtacatcagtcatcagccagtgattggcagttgcgggtatgccatctacttcattgaaggatgccatgacactactaactccagcctctacagcggcttgataagggtataagtattcgttaaacatgcgattacgactcatgtctacagtattatagtctcgtccggcctcccctgctccataaagggcaaagtgtttaacacaagccataatttcgtcatcgcgttgaagctgttgttcattgtttgctccttgatagcctagtaccatcgctcgcgctattgctccacctaaaaaggggtcttctccattaccttcgctaacgcgtccccagcgtggatctctactgatatctaccattggactgaatgtccaacagatgccatcagcactagcttctacagcagcaatacgtgctgattcttgaatagctgccaaattccaactacatgaaagtcctagaggaatgggaaatatggtttcataaccatgtaccacatccatgccaaaaagtagagggatacctaatcgtgagttctctacggctagtttttgtacttcgcgtattttatctactcctttcagattgagtactccacctactagaccttgctctatttgtcgggctacgccgctgttacgggcctgcccagtggtgatttcaccggtgacgggcaggtttaactggcctattttctcctctatggtcatttttttcatcagttctgttacgaacttgtccatttcctgaggtgtacttttcaggctattttttcccggcattgcaattgccatgagtgtggatagagaaaaggctataaataatattctttttttcatatcttataacttgaaatatatcaagtgaaaatagattgttatactatatagattttgccaatgaggcttattcgtcttttggttcttttaataaatcgggagtctgagtgtattggttgaaaggaagtggcaaaagagctttgtcttcagaccatcctaccaattctgtctttgctaggcccgtgcgtacaaggtcgttatagcgttcgccccattcgcatactaactccatacgacgttcatcgatgacttgttcaaaggttacattcttaagttcgggcattttggcacgtcttctgacttcattgaaaggattgtcaccacttttgccatttttaattttagcttctgcattcatcaatagtacatcggcataacggaagattcgtacattgttgtttgtaccatattttgttcgtcccggagtcaattggttggtcggcgtataggcctttccattccagcagtctgtttttgcagaattgatctgtggcttgatcacgtcaccgtctggagttgtagagcctgctaacaagaatgatgttgtggcacgcacagtttcgccacgttcgtaagcccaatcacggaaggacttcaaaatgccacaatccccccatccattgatattgctaccggaattattgggaccttggcaagtgaaccactctcctggatcgattaagtcaccggaaccattgccaaaatcggtcatttggcattcgaatatggattcgtcacaaagttttcctggaattttgaacaactgatagaagtctggatagagtgtaaactttccgttcttgatgatgtcgtctgttaattcctccaccttggtatagttagcttgattcagatgaatcttggcagctaacattgcagcagagaaagctgttacagctcctttatgttcactttgattaggacggatacgtggcatattgtccatgccgtattgcaaatcttctaaagcatatttatagactgcattgacggtggaacggctcaaatcggtttgattattgtcacgaaggatagtaaccgctccaaatgcctgaactagacgataataggcgtaagcgcgcataaacattacttcacctcgatattgcttataggttttcatatcgtcgtcattagttatgttttcggcatataggtctaatgactcgatggctgcattggctgttttgatgatattatagtattgcatccataattcattgattccccaaaaagaatcattatatttatattcgcttaggttgtagtagtcgctaccattccattgaccactgaatacgtcttggtcgcgaatggtagtgatttcccatataacccagtgaagaccactagtacgaatcttagcatatacacctgatacaggttgatacatattacttaaattggtatagtctactttttcttctggtacctttccttctggttctttgtccagaaaatcattacaagacgcgaatgacaacaccattaaggcggatattatatatacaaagggttttattaatgttttcattagttctagtttattgatatttttactaagtaagtgtcttcgtaggggagcatatcttttttagaaatcaaatcttaccccaaaagtataagatgatgtcagaggatatacttcagtatcccagccctcgctgtcggataactcaggagagaatgagttcgctttaaaagtagtgaacggtcggtcagctgtgaggctcagacgtattcccggcataatatagttgcctaatttgagattgcggaatgtatagccgagcgtaatattctgaatgcggaagaaatcagcactttccacaaagtaagaactgtatttttggtcacttacattccatggtttaagtaaggcggcagccgatggattagagttggtagagcctgggcctgtccaacgatcctcgtattgagcgcggtcaaagttatagttttgagaagaataacgaagcgcacgtttacgattgaacatttgagcaccggtttgtccataggtagtcaactggaagtcgagattcttgtagttgagtccaaggtttattccataagtgaagttgggaatatatgagcctaatgtggtgcggtcattaccgtctagaactttgttgccatcaaggtcagcatattttagatcacctggtacgcaaccattggctacagcaatggggtcggcggcaatttcctcatctgtttgataaacgcctatcatcttgaaaccataaaatgaattcatttctttgcctacaatatttacagtttttcctcctctaatgattttgttgtcacccaaatcttttactcgatttcttagggtggagatatttatacctatgttataggaaaaatctttgccgattttgtcattccaattggcacttatatcaatacctgagtttagaatcttaccatagttcccggctaaagtcgtggtactgaatggaaggagcggtgcaattacagcattgcttgtcatgcgatggtaatagtcaaagtcaatattcaaacgattgttcagagtgataaagtttatacctgcattccattcctctactacttcccattttaaccaactaaagtaggtcgtgttttggtatcctgctagagtagtgtttccaaagactccagacgcgtcattgccggtagcaattgaggcgaatccatcacttgctgctacatggtcattacctagtttaccccagctagcacgtaactttagaaaatcggcccatttctgacctttcataaaaggttcttctgagagaacccaagctgcaccaactgaagggaagtaaccccaatgttcctgatatttgctggaaccatcggcgcgcatagtgaacattaacagatatttgtcatcataattataattcaaacgagtaaagtaagagatacctctgtagcagtaaccatcgtcttttatggtagcacctgcagcatcaccatttttaatgtaccaatattcatctgcaccttcgggaacgttacttgctttaccttcgaacatacgccattgttcctgacgcatagaataacctgccatagcaccgaatttgtgtttaccccattggttattataggtcagagtgttgtcccaaatatagttatagtatttattttcattttttgtaagttgggttgttgctgattgttgccaactgctaacgtagtatttgggagtgaactcacgaccctgagtggataggaaactataagaataatttgttttgaaattaagtttgtttggaataaaatcaatctgtgcatagaagttacttaaaacttgatagttctctttgcttgaatcaaaatatttggctgttgcaatgggattgtaaaaatttgatgtataacctattgcatctggagatccaaatttgtcaggaaagcctttgtcgttattttcatcataaagagctacaatcggtgggcagttgaaggctttctgccatgcttgattattaggcacttgctgggtagaattactgaatacaccattgaatccgactttcagccaattggcagcgtcatagtcgacagaaccacgaaagttcatacgcttgtagttgttgtcaatgttcatgataccgtcttgatataagtagcttgcacctacagaataaacggctttatcagaaccgccatttatatttaaactgtggtttgtgataactgcagtacgtagaagttgatcataccaattgttgtcagcaccgaatgtccaattgtgaaaatcagtgtcggcatagctacctccatatttatcaatagattgtttgaaatgtgcttgataagcatcataatttccttcaagaagcatggtggcgtattcgtgcgcattgcacaactcaaggacattggatgctttttgaataccgacatatccgtcataggtgatttttgctttttggttacgtgctccttttttagtagtgataagtactacaccgtttgcagcgcgtacaccgtatatagctgcagctgaagcatctttcaagattgacatttcttgaatatcagcgttgttcaagaagttgatgttatcgtaaaacatcccgtctacaacaaataagggcttactattggaaaaagaaccaatgccgcgaatttgtacagtaggcccttctcccggtgcaccattatttacaatgttgacgcctggtacttttccctgaagagctgccatcggtgtggtagatggtactgaagttagtgtttctccctttacaacggtaataggagcagttaaatctttggcttttgctgcaccataacctattacgattatttcttcaagttgttgtgagtcttcttttaaaatgatattgatggtagattgtccattgacttttatctcttgtgtcagcattccaatatagcttacgactaaggttgcattttctggtacatggttcaatgtatactttccatttaaatcagtaactacaccattattggtgccttgtacgagaatagatacacctataagagcttcaccggaaatatcggttacagtacctattacattttttgtttgggctaatgtagatgtggctattattagcagacatgtcattaggaataaacttttaagataagagactcgtcttaaaagaagatgtggttctttcttcattgcattaatttttagtggataacatttgtttttttaattgatttttgccctgcgcagtgctttaattcaattttagacaaatgtatgacttgtgatatctgaaaacaaaaaaacaccctcatcactaatacataattctgatttttaatagttttataaattcacatttactactcaattttttgtaattatctgattattagatttatgtatgctcaatttattgtcaaaaagaaatcgtttaaattttgtgtagattttaaatttagctttttgcgaagacgatagcgattgttttcaatagaacggatggataaattcattaacgaagcagtatctttggtatccatatttagttttagacaagcacaaagtcttaaatcgttggtggtgagttggggataatgctctttcaatgttttgaaaaaattatgatgtttctgttcaaatttgatgaggaatattttccagtcgtcttctgtattgagattattggcaagtagatgatttattttttgatagagtgggattaacgccttttgtgtatttttagaacaaatctcatctactattctttttaaattcagaattagttcgtttttctgtataataaatgaggtttgtgtgaataattctgcattttttctctctatttcgttctgcaattgttcattcatttgacgtagaaattctgtttcttttattttcattcgctttagattctttgcttgtaatcgcttcttcatcaagagaaaaatggcgaaaaaagaggctattattaatagggtacagacaagataccaccaggaggtaagataccacggtgggagtattctaaaatggataatagtatcatcagaataattgttcagcccatctgtggaatgaagacgcaaggtgtattttccatgaggtagccgggcataagatatgtaattttgttttttggcttggctccatgtgctatcgacatcttctagtaggtattctacaaataaattcttggcaaaggcatcgttgacagaaaagcctatggtcactgtattgtcttgataagcgattttaatatctttattaaggaagttattgtttatactattatcttttcctgtgcgtatgtattctaaatttggtggagtaaggcttatgttgtttgattgcttgcttttttgagaattatgtatgataaatcctgtatctaaacaaattaatgagagagaatcatttagtacggatatgttttcggatgccgtaataagtgataaattgtctgcttcaattttgtaggcttcttgaatgcgggcaatgtagccgtcatagaagaatctataaaccgaagaacttgtaatggcccaacttgcttcatgattgatgggaacaatgcgtttgagagagttaatatttttaaagcattggtttagtagtggagaggattgtaagttatctttgttttcgttgtaagcatagaattggtcgtttcctaaaaagaaaatacgtccacttgccttacatatctggagatgttttggaagagttttgtctttcttgtgtccgtagtaggtatagtagcggaaagcgttcatttcttcattcagccgacatttgtagactccattgtttactgtccccaaccagatgttacctaaatggtctatttcggcttcattgatagggtcaggtatttctcgtatgatatgtacatcttttgtttccttattgatgatataaacttctttataagtaacgagaatatttatttctttctcattataattagtttctaacattttgaacactccaatgtcaattcggtagggttggtgtatgctaaagtctgggcggatttctagcaatcccttgttatgacaacaaaagagttgtccatctatttgtttaaaggcccatacttgtccctctgtacctttgagaaatttcatagaagagaacatttcaagatctttggttttctctttatggacgaagtatactccctggttggtacctataaatagatagtcattccacaatgtggctgtatatacagcacttgagatgccttctgttgtgtgatagtagctcaatttgtttgtatatcggatatatgcaagcccgcggtccattgccacccatatattgttttgctggtcttcatataaggatagaatagtattattttgtaaggagttggcagcatgaaaatggttcagtacatttccttgtatgtctacttcgtagataccacttagctgtgtccctaagtagtatgtatttcgtttggcacaatagataccacaattcagttcttgtccgtttaataatttagagagggaattgttccacggaataaagtttttgcggtcatatagataaatttctcctgtggaagtacctattaaatagcgttctttcccgtagggtagaataacacgagtaagagttccatttagaaattcactgccttttatcttcttcagttgtttgtttgccaattggtatagcgaaccatacatttcctgtacccaatattcattcctcactttggtcagcaatagaaaaccttttggggtcgttagttgctgtatggtgtggtgatcatagacataaatattggagaaagattgaaaataaactttgtcattgtctatccatatacgccaaaaactttcattttccaagcttttaggtgggagcatatttttgaaagaagtatattgaagtttacctgcttggtttctatcccatcgtcctaattcccccaaagcacctacgtaaattgtagaatgggattctactgccaaagatcttatcaaagaaaaatttggcatttgataaattttccattctataccgtcaaattcaagcaatccgatgtcatttccaaagtaagtaattcctttctcatcttgtccaatggtccagttcttgtttgcagcatgatacttatcgcgggcaaagtttataacgtatggcttttggtgagcaatggatggagttatcaccagtaaggacaagataaataaaatgaagtgtctttgaatgctcatggttctcttatttttcagcttttcataatagtatgagtgaacaaaaatagggaaaaaatgtaaaataatagtcttttactgaagtttcatggttttatcatccgatgccgaatttttcgtagtctaattaagctctgatttttattatggggtttgatatatttacaagatgaagtattgtctgaagtcgttcttatgctatgataatttactagtactttgttgtaatacaagcaagctttccggtcccatattgaacagcaaatcgataatgctgaggttgggcaggaagccgagtctttcctgaaatacctggtagtagggttggggaaagaaatcggggtcttccgtacggaaatcctttttgggatgaatacgttcgcggaaatccgcttcatcggatgtaattccggtcttatactccgaggttcgtttcagggttggctgtatgtctatcagggagcagacgaggtggcaaagttcttcgttgaaatcggctaaaaactcatatttcttttcataaaaagggcggaaatcatctttgtaatattcaaagaaaggtgtatggttgtatgccgattcaatggcattccagtgcagatgacgccagttgccgtggtcggagatacggatatcacgcatcgggcatttcggtgtgtcgggtttgactgtaggaatggaaagggcaagttcaccgtcgggcgcagcaatggtgcaacggttacgatacgtctgtttggtataatggtcgtgctgttcgatatatatttggtcgtatgccaacagtttggtatagtattcaaccggagccagataggcggaagaaagatagacggtcatttgaattgagcatttaagaattaaaaattaaaaaataagaaccggcaggagttactgcctggtactttatcatttggctgtttgattatcactttatttttctccatatcctgtcccagcgatacccgttgaacaatcccgtatcctgctcctttgagaaccagatgacggcggcctttccgatgacatggtctttggggacaagtccgaacaaacgggagtctgacaggtttatcgagttgttggcacccacccaatagtaatctttcataaagtaacaatgctgtacaggttttccttctatgtatagtgtatcatttttgatgtctgcccgtttcctttcatgcaacaccaatgtgttgcgcagcagtgtcatgttccagggatatacacgtacggctttccctttgccagggatgatgagaggtttcagtacgtcaaccgagtcttctttatcggcaggctctatccagttgtttgttcctaaagcctgttccaacagataatactcgtacctgctgaagctgcgtacgttttttgccgtatcctgtcccaataatacgttggggcggatagaaaggatagtgagcagtgagtctaactgcttctctttcttccggggatatgtataaaggaacttctggtcgggagcgtttttttccgaaggaattacggagaaaagagaatctacccataaagtatctcccggtactcccaggcaacggccgatgtatacttctctctggtcgattgctgtttgtgagaggttggcagggttattgaatacaagaatgtcatccttacgtactggtttgtcgccccaacggtgatacccccataagcttatgaaaggcaaccgtagtccgtagctccatttgtttaccaggatgcgttcaccgcggtacagtgagttttccattcctgtggaaggaatcagataggaagttgcaacgcagctccggagcaatatcactgtaagtattactccggtcagggtagctgcaatcttccaattccttctccgcatagtgtgtattgatcgctaacttccggtcactgtattaatgtacccacttgaagatgcggttccaacggatttttccatcaaaccaaccacggtctttatctaatgagagccagacaacgataggcttacctactacgtggtcttccggtacgaagccccagtagcgggagtcaagggaattatggcggttgtcgcccatcatccaatagtagtccagcttgaaggtgtaggtgtctgttttttgtccgttgatgtagataccgtccggtttttgttccagtgtattgccttcataagctacgatgcaacgttcgtaaatgggcaggttatctttgttcagggtaatggtcgcacctttttccggtatccagactggaccgtaattatcccgtgtccactttgtatagaggttttgcggatacatttgtcctgaaaggttttccggttccatgacgatgcggctgaccagttttttattgccggcaagcgtatcgtacattttttgggtgaggggcaggtggtacaccggagtcagtctgccttgagcatcgcggcggtccaatcccatctgcataagtccttcttcataattgaagtcatcggtcatcagtatctggtcgtcgttactgatgcccaattcgcgaaacatctcttccggtatgtacgggccggtggtctgtacgaaatagttgagctgcatctcttccggattctcgatggcttttccgtcgatgtacacttgtgtatctttgatttgcagggtatctcccggcaggccgacgcagcgttttacatagttctcgcggcggtcgaccggacgtaccacaatatcaccgtacatttgcggattggtacggatcagattacgaccggcattgtaataaaggtcgtagacggtacgctgctggtcgcgcgtcagactgtccatattgattttattgggatatacgcgctgtccttccctgtaagccaggctgtaaaaatcttcttgctgtctgttaagcgctaccgtatcacccgcaggaaagttgaacacgacaatgtcattcagcttcacttttccgaaacccggtacgcgtttgtatttccattgcggccattcaatgtacgatttggtgttgaatatcggcaaagtgtgttgtgccaacggcatggaaagcggtgtgttcggtacacgcggaccgtagctcattttacttacatacagaaagtcacccaccagcaatgatttttccagtgaagacgaaggtatctgatagttctggaatatgtagatattcacaaaataaacagccaccaaagcgaatacaatggcgtctacccaactcataatgccacgcacagccggattcttggattttttccagaaactccaaggtattttcttgctgatgtagatgtcaaatatgaaaggaagtacaatcagtccccaccaacttttcacccagacaaggaacatcaggtagagcagggtaactatgccgaatttgacccattgggcacgtgttgcttttctcataatactttagtcttttaaaaatggaaataaatcgctcatgcctaagaaaccttgtttgccggctgtatattctgctgccaacacagctcccaaagcaaagccgctgcgggtcttggcatcatgggtaatggtgatgctgtctgcctctgaatcgtagcggatgctgtgaatgcccggtacttctccctcgcggatagagctgaccggaagttcgtcggcagcgcatttgacagagcctgacacggttccatccggtgcttgcaaggtaccttttacccaacggcttttgcggtcgagattatccagaataccttcggccagggtaatggcagtgccgcttggagcatccagcttgtgtatatggtgagtttcgctcattgttacgtcgtaagcagggaaccggttcatgatcttcgccagatatttgttgacggccgagaatatggctactcccagactgaaattagatgaccagaacagggtttttccaccttcggaacaaagctttcttacctcttcaccatgttcttccagccagcctgtactgcccgaaaccaattttacgtctgccttgaaagctttcatataattgttgtaggctgccgtcggattggtaaattctatggcgacatcggcacttttgaatgcggccgattcaaaatcctcctggttattcacatcgatgatgctgacaatttcgtgtccgcggcttaaggcaatcttctcgatttccttacccatttttccgtaaccgattaatgcgattttcattgtttctttggtttttattcagtttatcaacgaactatatgtcgcaaaggtaatctttttcttacatttgcgcacaacattaacgataagttaacaatggaacaattgctgcattacgtttggaagcataagatatttcctttaatgcctctccagacaacctccggacagccggtcgaagtgatagatcccggtttgccgaatactgatgcaggccccgatttctttaacgcaaaactgaaaataaacggtacgctttgggtgggtaacgttgagttgcatacgcaggcttcggactggtttcgtcacggacataaccgggatacggtttacgataatgttattctgcatgtggtggacgagtcggattgcgaggtgtactatgccaacggcggtattgttccccagctactgttgcactgtccggacaatgtccgccggcgttatgacgaattacgtcagacggaaatataccctccttgttattctattcttgcttccttaccgaaactgacggtccattcctggttatcggctttgcaggtggagcgttttgaacaaaaggcacaggccattgccgcacgtctggagcgttgcaacaatcattgggaagatgtattctttattacccttgcccgtaatctgggtttcggtctgaatggcgatgcttttgaagcgtgggccgctcatctgcctttccgtgcggtagacaagcatcgggatagcctttttcaggtagaggcgttctttttaggacaggccggacttttggaagaagattggcaggaggattgttactaccgggaacttcagaaagagttccattatttgcagcgcaagttcgaattgtcagctccagtgagcagtgaccggtggcgttttttacgtttgcgtcccggcaatttcccccatgtgcgcctggcacagcttgcctggctgtatcataaggaacaatctttgttttcacgagttatggcggccgaaactgcggaagatataaagaagataatatccgcacggacttcgccctattgggagacacattttacgtttaaaaaaagctcgccccatcaagaaaagcgtttaggagagaatgctttgaaccttattcttatcaacaccgttatcccttttctgtatgcttacggaatgcacagagcagatgaacggctttgtgaccgtgccacttgttttcttgaagcattgaaagctgagaacaatcatgtcacccgtctgtggagtggagccggactccccgtttatactgcggccgactcacaggctttgcttcagcttcaaaaggaatattgcgacaggaaggactgtttgcgctgccgcttcggttatgagtatttgaggggtaagaagtaacagatgtaaattcccgccggcttttcattgtaaatttccggcttgtcgtatatttgcactttaaatcggaataactcgtatctattatgaaagctattaattttgttgtttgtctgtgcatggcgtttatgctctcaactttcaacagtctggcagccggagaggatttcaagtcatttctccataagtttacatccagtgcttcatttcagtattcacgtatcaagtttcctttgaaatcgcctatcgtattgttgcaggatgacggcgagacagagcagacttttccttttacccgtgataaatgggcgttgctggatagtgaaaccttgaaagaaggacgtatcacagaagaggaaggaggagtttacatctcacgttttacccgggatgaacctgcctataaagaatttgaggcggggtatgacgagtcggagccctcgctccgggttgtgtttgagctggtggatggtaattggtatgtgaccgactgctataatgattggtataatctcgacctgcctatcggggagctggaagagactgtccgtacaatgcaggaggagaataaaagttttgaggagcttcatccgtaacatctgctgtcgttttttggatttttgcacaagggcatgtgctttttgcattggggcaaacaataaaaaaagtccgtcggataatttccgatggacttttttgtatctgactccggtattgaattttttctttcagagtattatatcatatccggtgtatattaccatcccggattgttagggcgtaaattgggattcttatctatttcgtcctgcggaataggccatagatagtctctttcgttgactacacggtcataaagtttcttgtttacgatatctttcaccgggcctgccacttcctccagtaaaccccaacgtctcatgtcactgaagctccagccttctgctgccagttctacagcgcgttcatgacggatacgggcaaatacttcttctttggttcttgcttccatccaagaatcaccgttattgatttcaggcatatttacactggcacggttacggactttattgatataatatacagctttttcctgatctccgttttccatctggttataacattcggcgagcatcagatacacatcggccagtcggatgataggaaagttaatcggagtgtcggcacggttattgatagcaccgtccatgttgccctctgctacgaattttctccagagatagagctgataattctgattgacacggatgaaaccattgttttcatgggcatcaccctgtttttccaggagaatgaattctgtatctttcggcgcatttttcacccagccggcatagtgtgtgtagggaagaataatagatgctttcatacgcgggtcgcgattttcgtacatttccaatagcttctcgcggcttgcaggataagttaccacttttttgctgttgtccagcttggcatagagtacttctttccttatatctatattctcgttataaccttcgaagtagtcgttccagttaaagggctttccgtctttacattcatagctgtctacaaaatctatagaggccatgacattgttccagcaacttccataggaagcacggctacccatatagaaagtcgtgggcataccgaaatcctgtcctacaccccctatgttctgaatggcgaaaatcatttcactgctttcatcaccacccggtttgaacaagcctgcataatccgggtagagttctttttcgccatatttgccttccttgtttgttacaacagcctcaaaacattctttggcggcttcatactctttggcatagagtagcactttacccttcagcgacatggcagcagccttggtagctcgaccggcattggacgcatcccattctgtaggcaggtaagtatcggcgttgtccaagtcgtcaatgataaatttgcgtacttcttccagactttttcttggctccagcatgttcatgaaatcttcggctacgatagtgctttcatcataaacaggtacaggaccgaagaagtccatcagagtaaaataatagagtgcacgcataaatcgggcttcagctttgtatctcagtttcagctcatcgctcatatcgcaccggtctacgttttgaagcaagatattggcacgggctatgccttcgtacagatttttgaattttccggttactaatccggaagtagagttataagtaccgcgacctataactgcgtatgatgcagggtcatatccgctgccgatgctacctaaacagtcaagaccgaactgacgtccaaaaatatcatccgactgcatttggctgtagacacccatcataatttggtctgcatggtcttgagtctggaaaaaggttcccgaactcaattggtcttcaggatatacatccaaatcatagcagctgcttgtaaggaatagagaagcagccaatgtgataaagagtttatattttttcattttattcaatgttattggttaaaagctaaggttaatgccgaacactacatttttcatggcaggatagtcaatgcttcctcctatttcaggatcgaagcctctgaaagaggtgaaagtgaagaagttctccaaactaccgtagaagcgaagacgttctaatgaaattttcttggttaatttggctggaagcgtataccccagttggatattacgtattttcagataagccagattctccaggtagaagtcgctcatttgtttgtttctttggtcttggtattccagcaggcgcggataggttgcatctgttctgccttcgtaccatctgccgtctgccacttccttgttcagttgatagccgtggcgtacactgggggtattggccaaatcattttgccagtaaattttagcaccggcttgcccttgcagcagcatggcaaaatcaatccccttataagaagcattcagattcagaccaaattggaattttgggttcgggccatcgcttacgatttcgcggtcatccatatcgataataccgtcctggttgatgtctttgtaaagcaagtcacctttttgcggagtaccgaaagctgcgaacggatcaacttttttgccgtctaccaccggagcattgtctatcatttgctgtaccaatgccaaatcttcatcggtttggatgatgcggtcgcaacgcaacaggtattgtgaattgatagcatgtccttcccaaatgatattagcgccgctgtaggtaatgccacctttgtctttgcctttatatttggtcacttcattctttacataagtaaagtttccgtttaccgagtaggagaaatctcctattttatcttgccaacccagtgtaagttccacaccttggttcaacacctctgcactattttgtttgggaatggatgcgataccgtgtacggcaggtgcggggagattgatgaggatatctttggttttcttgtggaagtaatccattgtaccggtcagacgattgttgaatagtccgaaatcaatacctacattggtcatataagttgactcccaggttaaattaggattggcaatacgggcttgtgccagacctaatgccactaaattgttcagactgtagttgaaagcaccgtcatcgtttttgttggcatataaggccagggcatcgtagttgcccactgcattgttgcctaacgaaccgtaagacaaacgcagcttcagtgtgctcaatcctttgtctcttaatccttccatgaatttttcctgttctaaacgccatgcaaaagatgcggaggggaagtatccggtacgtttggatttgaggaagcgggaagattggtcggctctcaaattgatttccagcaaatacttctgttgccaatccaagttgacacgaccgaagaaagaacgcatggcccactctgcactacttccactggcagatgcatcaccgatagcaccattaagtactccaaggctggtatctatcatatcatatttagtagctttaaagttgtgtgaacggtatttttcctggctggcacccaacattgcattgatacctaacgcatcgtttatcaggcgagtttcataacgggctactacatcattgaagaatcggtctatctttccgtcgtagttcatgatgctacttttcttcttattggtgaaagttactatttcatttctgaagtcccaaccttcaaggaaaaccggtttgctgcttcgctcttcatctacaaactcataggagtaggagcctgtcagggtaaaacccttgaatggtttgagtgttgctataaagcggcttcgtacattggtcttgtgaatgttaccgtccacggagttcagacgaagcaatggattgttgttggctgattgggaagagtcttccgagttgttcatagcaccgtagcgtccgtcgggagcacggaataccatacccggagtggtggctgaggcaaatttaaatacatcgcttactgtacttccttcactttgatacttggctgcaggatccatgttggaaacgtaaccactgacttgagcggccagattcagccattttttaacatcggcagagacattcagacgggcattatatttctcaaaaccggtgttttccattacacccggattattttgatagccgaaagatgagtagaatttaattttttcactaccaccgttcatggaaataacatgattgtgtgcaacggaggatttaaaggtttcttccagccagttggtattgggatatttcaacggattttttcctgcatcagcacgccattcttcaataagagcctggtccttaaagggctttgccatgccagactgctcatatccttcgttaatcagttccatgtaatcggcatagttggataccggatccatgtggtggggaatggtggttgaagtacaagatatgtagccgttatagtctatatggatacttcccgccttgccttgcttggtggtaattaagataacaccattggccgcccgtgaaccgtagatagccgcagaggcggcatctttcaggatagatatagattcaatatcctgaggattgaccgtattgatgccggcttccgcaccatcaatgatgaccaggggagccgattcgttcaaggtaccttgtcctcgtactgttatagtagcattgtcattacctggttggttgctgccgctcataacgctcacacctgctgctacaccggccaaagcttgtgatacattggtaatgggacggctttctgtcagttctcctacatttacagaagaaacagaccctgacatgtttacttttttttgagtaccataacccactaccactacttcttccaaggtctcggagtcttctttcagatggatattcagatttttggttgttccagtaatttgaatttcctcggtaagaaaaccgatgtacgaaatttccaagacagagttaaccggaacttcaattgaaaatttaccatcgatgtctgtgattgtaccagtagtacttccttttacatgtacattggcaccgataaccggtccgtactggtccgttacgactcctgtcacagtttttacttgagtaatactttctattgcatgatgatggggcgtttcgttctgggtattgccggcccatgcaacagtgtaggtagaagctaaaatcaaggatgctcccaatacaattctcttgggtagagaaatcgggtcttgcttttttctcataaaacaactaattaaggttaaaaaaactacggatataaatttcttatatcttatattgaccgcaaatatatgtgtaaaatgcataataaacaatacgagaatttatttctatcgcaggcccgtaaagaaccgtatccaatgtatttccgctatttcttcctaatcaataatatgtaaattaatatgatacagacaaatgggaatgacaactctttttctgtttcagcttgttgtctgaggtatgatataagggcttatgacatttttagacctcttctgtacgatttatgtcactcttttttttgaaagagctttttctttgtacaatacttaattataagattcacttacgcggaggagatgttgggtatttaaaatgaaacatataaataaccttaagtaaataaatatgatgcaatttagtaaatggacaatgggagtagggatgctcctcgggactttgttaccggtaagtgcagaagcccaggtagtgaagaatgacaaactgctttcttttgaagacccgcaaataccggtatttatttcgggaacggattcccgtttggaaatcagtgatgaacattataaagatggtttgcagagcttgagttggacatttaatccgggggctgtgctttctatcaaaaaggatttgaagttcgagaaaaaagaccctaccggaaaagatacctatctttccgctttcattgtatgggtgtacaatgagcaagcacaggacaagaaaatagagtttgaatttttaaaagatggaaagaaatgcacttctttcccatttggaatcaactttaccggttggcgtgcagcatgggtgtgctatgaacgtgatatggtggggacgccggaagaggggatgaatgaaatccgtattattgctcccgatacaaaagggaagttatatttagatcatattatacccgccagtaaggtggatgcccgccagcagacggctgacgtgcaagttccgtttgtgaataagggaactaccaatcattggcttgttatttacgaacattctttgtggaagccggatatacccttgactgccgttagcgaaacgcagaaacaggaaatgcggaaaatagaaaaacgcttcagggatatgctctatacacccggaaagttgtcagataaggaaatgacggctatccgtaaacagtatgactactataagattacgtacaaaaacgggaaagtgagcggtctgcctatcttcatggtgcgtcaggcggaagcttacgaacgtatgataccgaattgggataaggatatgtttaccaagctgggtatggaaatggacaagtatttcaaactgatgaaacgtattgccatagcctataacaatgtagcggatgttgctgcgcaggatgaattgaagcaaaagttccttgccatgtacgaccatattaccgaccaaggcgtggcttacggcagttgttggggaaacatccatcattacggttacagtatgcgcggactctatgtagcctatttcctgatgaaggaggtactgaatgaagccggcaagctgaatgaagccgaacgcacgctgcgctggtatgccatcactaacgaggtttatcctaaacctaccgtaaacggtatagatatagattctttcaatacgcagactcagggacgtatggccagtatcctgattatggaggatactccggaaaagctgcaatatctgcgttctttctcgcgttggttggattatggatgccgtccggctcaaggcttgtcgggttctttcaagaaagatggagcttgttttcatcatcgtaataactatcccgcttatgctgtcggtgggttggatggagccacgaatatgatttatttattgagcggaacagagttcaaggtgtctgaactggcgcattccactgttaagaacgtgctgctcacgatgcggttttattgtaatttgaagcaatggtctctttccatgtcaggtcgtcatcctaacggaaaaggagaactgattcccattcaatatgctactatggctattgcaggaacaccggacggtaagcaggaatatgatgccgacatggctgctgcttatctgcgtttgatggcttatgtcaataggcccgatgaagatgctcctgattatcttccgaaggcttccactcgtcaagagttggagatgaagaaactgcttgaagcacagggattccgccccgaacccgatccgcaaggcaaccttgcattgggctacggttgtgtttccgtacagcgtcgggataattgggcggctgtagtgcgtggacattcccgttatctgtgggctgccgaacactatcttcccgccaatttctacggccgttatctggcacatggcagtatgcagatattaacgggtaaacccgatgaaatggtgacttttactactagtggctggcaagaaaacggcttcgactggaatcgcattccgggagtgacgagtattcatctgccttttgagcaattgcgcgccaaggtattgaatgtggatgtttactcaggtatggaagaaatgctttattccgatgaggcctttgccggtgggctgtcccaggcccgcctgaatggtaacttcggtatgaagctgcatgagcatgacaaatataacggctctcaccgtgcccgtaagtctttccacttctttgacggtacgatagtatgtttaggtacggacattgagaatgcgaatacagagtatcctaccgagacgactgttttccaattagcagccattactcctgagaatcataaatactgggatggttacaagagtgacggacagacttatatcgatccgaatggggtagggtactatctttccaaatcctctatgagaagtgcgaaatatgaaaagaatttcccgcaggttacagtcggtgaacgaagtacaaagccgacttcgggcgattgggtttccttgacgctgcaacatggtaaggctccgagaggcgcttcttatgaatatgccgtattgccccgtacggacgctgtttccctgaaagcatttgcgaagaagccttcctataaagttcttcagcaggatcgtaatgcccacatagtccgttctttgacggataatcttacctcttatgttttgtttgaaactcctcagacgcttcctgcagacggtctgttacagaaggcggatacttcctgtctggttatgattcgtgaagatagaggcaaactgttactgactgtttcccagccggatttggcattgtaccgcggtccgagtgatgaggcttttgataaggatggaaagcggattgaacggagtatctattctcgtccgtggattgataacgagagtggagaaattcccgtgactgttacattgaaaggttggtggaaagtagcggaaacaccgtattgcaaacttgtttcggcagataagaaacaaacagtgttgcgttttacgtgtaaggatgctgcaagctttgatgtagagttgttgcgtaaataggttttgattaaatcttttttgtcatgacggaattaaagaatatcatgttttgtgcaactgcctttgccccctctttattgggggcaaaggagctgcctaatattatttatattgtaaccgaccagcagacagcttctgccatgagttgtatgggaaatacagatgtacacacgccgaatatggatcgtttggcacaggcaggtattttatttaaaaatgcttattgctccgctccgttaagcggtccttccagggcatccatgtttacaggacatacttcccacgaagtcggactctcccgaaacaacgttcctatggccgattctttgcgtactgccagtttaggctggttaatgcaacgtgccggttatgagtgtgcttatggtggaaaatggcatgtacataccccttccatgcccgatggtgagttcggcttttctaccattcatccgcataatgataatggcttggctgaagcttctgttgctttccttgagcagaaacattccaaacccttttttcttgtagtggggtttgataatccccataatatctgtgagtatgcgcgcagtcagaacttaccatttggcaatttgcccgaacttcctcaagatgaatggcccggacttccttcaaattttgcccgtaatccttatgatgccgatgtaatagattatgaacagacattgaactattcggcttatccaacccgtcattattctcctgatgattggcggcgttatcgcagcctttacttccggctggtggaaaaggtggatgctgagattggtaagattgtcgatgcaattgataaacaggatttgtggaagaatacggtaattatctttacaagcgatcatggtgatggtatgggtgcgcatcattggaatcagaaatcggctttatatgaagaagtagtggatgtacctttgatagttacccttcccggaaagaagaatgccggcaaagaaatgccccaacttattaatgaaggtgtcgatttcttcgcttccgtatgtgactgggcgggaatttcccttcctggaggtttacatggcgtctcttttaggtctttggtggaaaaagctgatcctcaacaggcacaccagccttatattgtcagtgagactacatttgataaaggagttgcccgaggttgggccttgcgtactccgcgttataaatatgtattgtatgataaagggctgtatcgtgagcagctttatgacatgctgaatgaccgcggagaaatgaggaacttggctatagagaaaaaatatcggcaaattctcttacaacatcgtgcttatttgaatgagtggatgaaactgcatcatgtagttcaaatacgtcctgaggtgcatttaattccggatatgtaaatcggaaagtgtgttaaatgctgataatcttacatcctgtcattaactttgcttagaatgttctttcatttctggtattaaatcatcgttggaagacgttaggccgataatgaccgaaaagcattttgacacactttctttctctgtttttattcttattggtatgaagatagcaaatcgtttactgctatccggtaattggttagtttactggttttatgtatagtttttttagctttacggttaccgttgggtagcagatattcccaaaagttcttcattttcatcaataactgtgtttcaccgccttgtaactgttcttcatagctgttgtatatcgctgtatgtagctgttttactttggatagcatttcatcaggagagagctttctgttttgttggtattcccaagctaaagccggattggcaagcagaccgcgccctattacaactcctgccaatctcggaaaacgttcggtaacggtctgtatatcttctattgtatgcaggtctccattatacaacaagggtttatcgcatccatgataaaaagcctcaaatccgtttaaatctacctctcctttatattgctgtttccctaaacgcggatgcaggatgatgtgggataggggaagtgtgttcagtaacggtaggagtgcaaggcattcattggcgttttcccagcctaatctgagcttgactgagaaacggatttgaggatatttttctgtggcagcagtcagtagttcttttatttcttcgggatacggcaacattcctgctccgttatgccgtttggccagcatggggaaaggacaccccagattgatgtctgcttcctggtaattatgctcgataaaaagggatacaatctgttccaacgtgcttggttggggggcaatcagttgggggatcaggtgtatattccgattgttttccgggtttatatcgcgtatgtcttttcggcggatttcaccgtgttccacacgtacaaaaggagaataataggtgtcgataccgccgaagatacaagcatgtgcttgtcggtaagcagcatctgtatatccttgaagaggagagaaatggataggcaataaattcttgttcataaccgcaaagatacgtttttattctttatcttttataggaataaccatattccaagagtgtgatgcattctcgaatccgccgggaccatccatagtggcaaagaaaatgtaagtaggtttgccgttttcaaagaaaataaaggggcgttccagttgcccttgcatctccacttttccgtcttcccattctatggtacgggaataggctttgggagccttgtctactgtccactggataccgttttcagagtgtgccataacaccaccgccccgttctcctgtaaatttggctacatggtctttgaataggatgtgatagccttcggtgtctttccataggaaagggtcttcggcttcaccttgtccgtttacttcaaagataggctgattgttgttcaatacatggtaaggaccttctattgcaggagcataggctattccgagactcattgccgaatgttcgtaattgttagtgtaatggcggcctttgaagatcatgagaactgaaccgtcttcctgtatgattggagaaggatttgaggtaaggaaactatagaatgtacccggttgggttttgagtatcggttcgtccagacgtttccagggaccatatggagaatcggctacagccagtccgatgcgcttattggcgcgggcaacggtgcaccaggggctgtctaaggtgagctgcgcgtatgtcggttcggcaaacgggtgtgtagatcccatataaatgagataatatttaccgttttgtttcaatatgcgcggattgtgtgtagaacgcccgtcccaatactgtgcaccgcgtgcgggaagtgcgatatcactgaaacgataaggtccttgcggtatatcggacacagcatgtacaatttcagacgcgaccatccatcccggatgaaatggtaatttttggggaaaccgggatacgaacatgtgatatttaccgtcatctccctttactattgagctgccccatacccaataaccttcggatgcaaaggcaggtgtgcgtggggctttatccaggcggtgaaacaaacggttttccgactgctgctttaactcaaccaggttttctattttttgcgcagatgctgttagaagaatgaaaatattaaagaaaagtatcagcttatatcttttcatgaatgtgataatgttatagcgttaattggatgtgaacaaagatacaggtttttcgtataccgggtatattgtttataagaaaaagagagaagaatctcacgatccttccctctttacatgttaaattgattaaggtctgtttatcagattattgataataaaaataaggttagaagttttgtggtatattaatatcctgcattattggtccaaccggcaaggtctacctgttgataaggtaccgggaaatagtaatggtgatttgtgttgaaagtggaagcatcccattcttcagcacgtacctcttttactttttccaaacgtaccagttcgaaccagcgtttcatttctgcaaagaattcccaacctcgttcgttggatacggctgctaagaatgcggcaggttcggttgttgtggtcagttctatttgcctgttttgataaccggcgcgtttctgtacctcctggatagcattcagggcatcttggttcacagagtttgtagcacgggtagaagcttcggcgtacattaaaagaacttctgcatagcggtaaatacaagttataccgtttgattgtgcacttttaccgggggctccttcgtcataatcatagtacttggagatggcgggaagtttgtctgcactttcggtatatgggataatctctccgctttttattttccattctgtcatatagttccattctttgcggtcatcattgggatacgccttaaagaaatcttcattgccgtaatagtctgcccatcctgcattaggagaataatcgctcggatagtaagatttaccgtagttacttgctatcttatgtttggcactatgctgcagggcaaacattacttcgttggtttctgttttcttgtcttctttccataaatcggaatattcggctgtcagtacaagaccggcttgggccttattgtccatgatttctttggcttgggctgctgccagaccgtaatattcggttcctttgtttaacggccatcctgccattgtcatataagcatctgccaagcatgcttttgcggcccattttgagggagtgctgttgccgctacgtcctttgttgggtaaccattcggtagctgtagtcagactgggaataatcgctttatcgtatatttcggcaactgatgttctcggcatggtgatggttgcctcatcgttttccagtaataaaggcacatcgccatacagacgggtcagatagaaataggaaagaccgcgcatgaaataggcttcgcccaatacttctttaaatgctttggcttctttttcgttggtggggatagtagttcccttgataattttgttggaactgctgatgaccttatagaacagggtccaagtagttgagaaatcagcatcattagctgtaagattcggagtcagtctgctataataagccagttcgttattggccttggctgcacggtaggtaatatcatccgcacatacattgatgcgttgcagacggctgttgaatccgtaatttccttgccataaatcgctgtaaagggcgtctgccgctttttcaaggcttgcttggtctaccgtattccagtattcttcttctgtgataaaggattcgggttcttgtgtgaggtctacgcaagaggtcgtcagtaataaacttccggcaactgctgttaaatatattaatttcttcatgttgttcttatttaagtaggttattcattagaatgagaaattcagaccgattaaataattgcggctgttaggataggctccccaatcaacaccttgtaccaaaggactacccatagtagcttccgggtccagaccggagtatttggtgatgtggaacggattctgtacggaggcatatacacgcaggttgttgatacccaatgaacggcaggttgcttcaggaagagtataacctaatgtgatgcttttcatcttgatgaaacttccgttttcaacgaaacgcgtgctgaagaagtctttattttcagttccgcctttcacgaatcccggtatatctgtattggtgttggtcggtgtccaacggttcagcaactcgcgcataggggttacgcctgccatttgttggctcttaatcaggttatatcccatttggtgagtggcattgtagatgtcaaatccatggaaacctactacgaagaacgagaagtcaaagtttttgtaattgaatgtattgttccagccccagttgaatgtcggttgtccgcatccgataatgccttggtctgcatcattgtatacgccgtctttgttgacatctacatatttggagttacccggttttactttgtacacttctccgttggttttgccgtttgtttgaccattggcatctacgaatggagcatttacatcatcctcctgccatactcctgcgaatgtgtatccccagaatgaacctaacttctctccttcaatcatttggaatatctggttttggaagtttccggcctgttgttggcggtggttggctgtcggaatcttgttgaacgtacctttgttgtgagataacgtcaggtctgtgtgccagctgaattctttatcactgaaaggatctgcactgattgtaaactcaacacctgtgttcttgatttcacctgcgttatcaaggatggcagtatatcccatgtgtgagggacgtgccacttccagcaaaatatcttttgacaatttgctataccagtctgctgttaagcgtacgcgaccgttcagaataccgaaatcaactccgacattgaactggtcgttgcgttcccattttaggaaaggagcagccggtcggtctatcttataggcggtagaagaactcccgtttggagtagtaacggtaacaggcgtcattttggaatagatacggtaagcctctacagcttggtttcctacggagccgtatcccaaacggagtttcagttggtcgatgaaactgttctccttcaagaaattttcttgcttcaaatcccatgccaatgcagcagaagggaagtaactccatttatctttcagacgtgaggaaccatcggcacggatagaggcggtaagcatgtaacggttcatgaatacatagttgacacgtaacattcctgacataagggtattgatgctgcggtcggatgcaatggctgcgaggtttgaatcggaccatgccagattattgacaccgatcatgtcgatatagtctaagttatatcctgtaccggtatggttgtagttgttgtcataagactgctcgaatacggcagttgcattgatacggtgattttcattgaattcctttacataactcaaagtgttggtattcagccatgaagtattccaatagctacgtgcctgtccttgagtcagactgtttttgtaggaataataactgtcttcgttttctaccgaagtattcagtctgttatcaaaaagcacgcctagttgagagcggaaactcaaaccgtccagaatatcgaactggacatagccctgtatgcggttattgattgttttgttagagttgctggattcccagatgtatcccataggattgtatgccttgccaccatcgaagaagctattgttatattctccttcttcgtttttgggttcgatggtacttggaaagtacatgctttgctgtatcaagccatcgtattcggtaatacggggtttgcttgtttcacgatagtgaccgtatatattcaaacctgctttcagccatttcttgattttggtatctacctttaaacgccagctgtagatttggcttcctgattctttaatgataccttggtcgtcctgataacggagagaggctaagaacgttgttttttcaccaccaccggcaatggaaagttcatagttctgagtaactgccgggctgcggaaaatttctcttgaatagtcatatcctgccttgccggatttgaatgcttcgagttgttccgggctgtaaaaatgattatcgccatagccaaagtattctttaccgtaatcgtttaccaagttggcatattcgtacggagagaggttatcggggtatttggcaacggttttaatattggcaaatgcgttgaaagagacagttagcttatccttttcaggatttttggttgttaccaggataacaccattggcaccgcgtgaaccgtatacggctgttgctgaagcgtcttttaatacctcaatggaggcgatatccgcagggttcaatgactggagagaaccaccgatgaatccgtcaattacaacaagcggtcctgtttctgccgtaatagagttgataccacggacgcggatggtgttgtcgccgctggggtcaccggaacctgagagtacggatacaccggccatacgtccttgcaaggcatcggatacattacctgtcggggtactttttaatgcatcggctgtctttacggaagccacggcaccggtcaagtcacttttacgttgaacgccatagcccactaccaccacttcttgcaataattgactgtcttcacttagcgttacgttaatatgcgttttgccggctactgctattttttgggtctgataaccgatatacgagaatacgagagtcgcattggacggtacgttgggaagtgtgtaatttccgtcaatgtctgtaatacatccgttgctggttccttccacttgtatggaagcaccaatcacaggacctaaattgtcacttactgtacctgttactgtaatgttttgtgcattagcttgtgtggcgaatagcacaaagagcaacataatacctaatgttttgaatagattagatttctgtttcataaatattaatttaattggttatttaaaaaaaggcttttatcagtcttgttcaaaatcggaaaatctcttcgcaaaagtataggctaataaaggtagagatattcactaattgtccgcaaataatctgatattgtacattatctgcggacaatcggtgctctgcttagtccttatttacttggtttttgcagcttttactttttccagcagaatagccagctcttttactttatcagggtgagttccagccaaattttctttttcggaagggtctacagataagtcataaagttgtggttggggattgtttcccgtttccattttagtccaatgttccaaagccggtttgtcactcggttcgatgtatttccagttattctgaatgatggatagagtattattcagattctgttgtaccacatagtcgcacccgatggtatccgtgccaaggaagttgttgagttggtcgcggctgtcaggggcaacacctgtaggaagttcatgattcagcagggctgcaaatgaagcatatacatcaatcatggaaaatggagcctgttgtttgcccggtttgataccattcggccagcgtacgataaatggaatacgggttccggcatcgaatgcgctatacttgccgccccggtaatgtttcatgggggtgtgaccgttcagcaattcaaaggcctggtcttgataaccatcatcaatgacgggaccgttgtcgctgcataatacgaagattgtattatcagcaatatccagactatcgagggtgtgcatgatctcgccgactgtccagtccagttgtaaaataacgtcaccacgcggtcctaaaccgcttttccctgcaaaacgcggatgggggactcggggaacgtgtacatcttgtgtacccatatacaggaagaaaggttcgtttttatgtgcaacgataaaatctttggcttttccggtaatgatatctgcaatatcttcatccacccaaagagcagatttgccaccggtcatccaaccgatacgggggataccgttgataatggtattattatgtccctggctgggtttcatctttaccaattcaggattttcaagtcctgtaggccagtcgcccactttgtgctggtagctgacagtaatgggatcttggggatcaagccctacaacatgggcattttctacgaacacacaaggaaccctgtctactgtggcaggaatgataaattcatagttgaagcctatgtcttgagtattcggcctgatttcgcgattgaagtccgtgccacctttaggacctaatcccaaatgccatttgccgacggctccggtgtaatagccttcctccttgaacatatcggccattgtgacacaagctgtatcaataatcagttcggaattacccggtgcaatgcctgtgttctcttgccgccagggatacatacctgtaagcagtccgaagcgggaaggggtacttgtggaagaggtggcatatgcattggtgaattgcataccctgaccggcaaggcggtctatattcggggtacttattttagtggcaccgtagcagctgaggtcgccgatgcccaagtcgtcagcgatcaggtagataacattaggcttttgcggttggtcactcttggcttcttgtttagacggattgccacatcctatcaaaaggaccgtacttggaagatacggtagaagattagataaatatttcatagcctttggactttaaagttttattccaagtccaaagatatgcgctatctttcggtctgtgtgtataaaagagtacacatggaatcataaaaagtacaaaagtgcagaattcttatttttcatttactgcttcttcctcgtctttatcagcttcctctcctttgcgataagccagcgggctgacatgatagatgtccttaaagcacttgctgaagtagcgtgaggaactgaatcctatcttatcggaaatttccgtaatgttcagttccggattattgcgcaacatcaaagcacctttcttcaaacggatagtcagtataaattcgtttggggtttgtcctgtaatggccttcagtttggtgaacaggttggtgcgcgccattgtcatttctctggcaaagacattgacattgaattctgtgtcgtccagatgttgttcgatgatagacatggcacggtccagaatgtctttgtcaatcggattggtagcaagcatatgtgcagccgtttgcggttgcttgctgaatttttcctgtaagaggatgcgtgaattcaccaggttgttgcagcgggatatcagtaagtttgtattgaacggtttggttatgtaatcgtccgcgccgatccgcaatccttcgatattcgattcaatggcagtgcgtgcagtcaataacactacggggatatggcaggtgttgaaatccgtttttatgagtttgcatagttctgtacccgacattttgggcatgaccacatcgcttaccacaatgcagggcatttcactgcgtaccagttcccagccttcttctccgttggctgccatcaatatctgatagaatggcttgaagatgttggcaagcatttcgcggatggactcattatcctctacaatcaatagtttggcatccggaatacgtttgatgggagcattttcttccagttcggttttcaggaaagcatctgcttcggatttggaaatttcaatctgatgtacgcaatccggattccggttgatttgttcttctgtaaagaattcgttacccaagcgtagtgtaacgataaagcttgtacctttgccaagttcgctttctacacggatggaaccatgatgtaattctataatacctttggtcaaagccagtcctataccagtgccgctcttgccggcatcagtagaaccggtcggttctatctgataaaagcggtcgaatatcttatctatctcctttgcatcgataccgcttcccgtatcttttacacaaattataacgttattccgttcttcctttacactgagcgtaatggtatcttctttttccgtatgcttgatagcattggataagaggttattgataactttctgcatttgcttctggtcgtaccatacttcgagttcgtcagtctctttttcaaaattgaagttgatttgtttggcactggcatattcaaggaacagcagatagttttcatacagaaaattcacgatgttgtgcggactgactttaatcttcatatggccctgttcctgcttgcggaagtcgagtaattcggttattagctcgcgtagctggatactgtttttataaatgcccaatatcttgttgtagatggcaggtgtgaagttctgtaattgcagcaaggtttctacctgagccacaataagagtcagaggagtgcggaactcatgcgagatgttggtgaagaagcgcaatttggattggttcagcgcttctacatcctgaatatgtttctgttcgtatttcaaagattcgcgtagtttgatttttgatttgtaggcgcgtatcagataccacagaaccgctcccgttatgataatatatatgaagtaggcaagtgttgttttgtagtacggcggcaatacatgaatggtgagctgtgcttgcggacaaaggttttcgtcttttccttccggcttgatgagcaatgtgtaagtgcctgcattcaaattggtgtaagtaatggtatgcagccctcgcgtgcttgtccattcattggaaaagccttccagtctgtaaataatatcgtctttgttggcaggtatgtaattggatgtggcaaactctatactgaacatgctttggtctgcattgagggttatctctccggtgtggcataaagagtgctgcaagatgccggttttatctcctacagagatttccctaccgttgacgatgagccgtgagaggataatcttataaggttttggggtaaagttcagttccatttcatggaaagaaatcatgccttgtatgcctcccagaaatatttcaccgtcgcaggtgacacagagtgcattttcgttgacggctgtcaacgggaaaccgttttcagcactgtaattattaaaagtcttatttttgtagttaaagatggagaatccttcgttggtgatgagcagtaatttgccgctgctgggagattcttgtgtttcataaatgcagtcactggccagaccgttcctttccttgtcgaaattttcaaaatcattggttgcggggcgatataagtccagaccgctacccgaggtggagaaccacaggttgcctttgctatcttgcgttatattgttcacattgttattgctgagactgttcgggttggtggcatcatggcggtagtttgtcagtctgcaggtgtcaaaacgataactgaatactccttctccagtggcagcaatccatagtgtaccctccgaatcgaatgtgacatctgctaccattttaatggattttccttctttgctatctttgaacagttgttggcattgtccgttagcggggtcaaagaggcatactccgttttgtgtggctataatcagcaggcttttgtagggaatgatatcgcggataatgtctgatggaagagtgttaggattaccttcttccatgcggtaatgggtaaaatgccctgagcgtatatccagtttgttaagaccgcccaaatgagtgcctatccatataatttctttatcggcatcataataaagcgcttttacattattatgcgaaatgctgttacgtccttcctgtgggcgataccatttgaattcgcgtgtgcggcggttgtaataattcagtccgccgccttcggttcctatccacagattgccgtctctatcctcaatggtgcgtcctacaaccggattgctcagccctttcttctcgttggaagagtaggaataacgggtgtagatttcatattccggattgaagtagttgacaccgccgaaataggttcccaaccaaagtgtaccttggttatcttttacgatacaccagatggaagagtgggtgagcccgtcggcttgtgtgtcattggctgtatggttctggaataatccggttattttattgtatcggtttaatccgttgaaagtacctatccatatattgcccaaattgtcctcacagcaggccctgacgaaattggaggagagactgtgtgggtctttggcattgtatttgaagttttctattgttccgtctgcttttacacggaacagtccttcttcccaactgccaatccacaattcactttcgctgtcctgataaaaactggtaatatttcctttctgaatgggatgcgtcagttcttttttgtcaatattcaggcagtatacgccgttggttgttgttcccagccatagtacatccttattgatgtgtatacagactatttccagatttcggtccgggagttgatagtaaaggtcgaaatttccagtttcctcgttataacggtatatttcattctttttgccgataaaaagtccgtcattgtaatagatgctgttgatattgccttgtattaacgtagtgaatttttgggtggcaaggttgaattccgtcactccttcggtgcagagcagatatattttcccgttatgattgcccgtaatgcgggatacggtattgcagaaaaggctgttgggattgttcttctgtagcttgtaggtctgtatatcgtctccattgtaacggttcaacccttcgcgtgtgccaatccataggatgccgttttcatcaacatataagctgtttacggaaaactgagataatccgtcgtcggtggtaaggtggttaaaggttatgttctgcccatacacatttgcgaaagccgcactcgctaaaataaagaataatctgatgataagcttctgcacgttgagtcatttttaaggtttcagtcacaaatataaggatattttgtacaaagattctcatttattatttggattttgcggttatgtttgtttaaatgtatatttttggatgttcatcggacaataataaacttattatatgtaataaagagcgtatatttgtatcataaattaatttatttattatcatgaaagaccttttatctatcgtatctcattttcaattgcagggtacagttcaagaaatcaatcctttaggggccggtcttattaatgacacctataaagtaagcactctcgaggctgatgcccccgattatgtattgcagcgtatcaatcatgccattttccaaaacgtagaaatgttgcaggccaatatcaatgccgtaaccactcatatccgtaagaaactggaagagaaaggcgagaaagacattgaacgtaaggtgctgcatttctttcctgccgatacaggaaagacttattggcatgatggtgagagttattggcgtgtcatggcgtttattcccaatgcaaggacctacgaaacggttaaccccgaatattcgtattatgcaggcgtagctttcggtaatttccaggcaatgcttgccgatattcccgataaactgggcgagacgattcccgacttccataatatggaattccgtttgaaacagcttcgcgatgccgtggcggccgatgctgccggacgtgtaaaggaagtacggtattttctggatgagatagagcgccgtgcagaagaaatgtgcaaagcggagcgcctgcatcgtgaaggcaagttacctaagcgggtttgccattgtgatacgaaagtcaataatatgatgtttgacgaaagtggcaatgtactttgtgtcatcgacctcgataccgtaatgcccagtttcgtcttttccgactttggcgatttcctgcgttcgggagccaataccggtttggaagatgataaagaccttgcgaatgtgaatttcaatatggaaatattcaaggcattcacaaaaggctatctggaatcggccaaatctttcctgctgccggtagagatagagaacctgccctatgcggctgctctgttcccttatatgcagtgcgtgcgtttcctggccgactatatcaatggcgatacttattataaaattcaatatccggaacataacctggtgcgcacaaaggctcaattcaaactgcttcaaagcgtagaagaacatactccggaaatgcagaaattcatagcttcatgcatttgaaaaggtgtataatggcggcgatgatgggttgctgtgtcttacccttattcgcattaactcctaaaaataagatgatgaaagaactggatgtcaagaaagtgagtatggcaaatataccggtagaagcggtgcctgctcttttggatgaagaaaaagtggcttttcagccggttaatacagtgaattgggcggcatatccatactgtccggacgtaaagttccgtattgcttatacggacaacgctatcctgattcattataaagtgaaagaagccagcgtacgcgcagtagcgggcaaagacaacgggccggtttgggaagatgcctgtgtggagttcttttctattcctgccggagacggagtatattataatatggaatgtaactgtgttggaagattgcttatcggtgcgggagcaggacgctccaaccgtcaacatgcaccgcaggaagtgcttgataaagtgcagcgttggtcttctttggggcaggaagattttgaggaacggataggagattgcagttgggaagtggctttggtgataccttattccgctttctttatgcataatatcacctcattggacggtaaggccattcgtgccaatttctataaatgcggtgataagttgcagactcctcatttcctgtcatggaatcccattgatttggaaaagccgaacttccattgtccggaattttttgggatgttgcgtttcaagtaggtacgagggttataatactctgaatagtaataaaaccggtatataaaatataggcttgcagatgtcttattcacaggacttctgcaagccttttttcttatatgccgaggtttactttacaataccttttgagttacggataaagttgatgatattatgtatctcatcactcatcggaacctgatcttcaatcttctgtaaagcgtcctgtatgctgaaattcccttgatataccaggcggtaagcattgactatatggcgcagaatacgctcggtaacctgatgcttatgctggagtaccaccgcattgataccgtgatattctgccggattgccgttcattataacataaggcggtacatcttttgagatgcggcaacctgcctgaatcaatacccaactgcctatgtggcaattctgatgtaggataacattactgctcaggattgtacagtcgtctatgtggcagtcgccagccaccgtgctcttaattcccagtacacagtgattgcctacttgtacgtcgtggcagaggtgaacaccgtccattagatagttactatcgccaatgcgcgtacatccgctttcgtgcgtggcacggctgataaccacattttcacgaatgtcgttgttgtcaccgataatcaaccgacttgcttcgcctgtgtaatgaaaatcttgcggttcactacccagtacggcaccatggtgtactttatttcctttacctaaacgcgtacctttgaggatacttgcatttgacataatcacacagtcgtcaccgatttccacatctccttcgatgtaagcgaaaggctgaatggttacattcttaccgatttttgcggtagaatctacagatgctaatggactaatcatagtaattagttatgagttataaattataagttatgagttatgggagatgagccgtcaaaaataacttataacccataacccgtaactgatattattctcttcctccgcccaatgcttgatacaggctgattacagactgcatgcggtcgaaggtgtcggccacttccgaaagctgtgcgctgaggtaagactgttcggcggacaagacttccaaataggttgacgtgcctaagttaaacaattcttttgtatcttccgcagctttacgggcagaattcacttgaatttcacgtgaaatggctttgtccgaggtcatttgatattgatacaaagcattgcttacttcatttccggccttgagcagtgtggtctggaactggattttggcttgctcttcctgtgcctttgcttgtttcaaccgggcaatgttggcaccgcggtagaacagaggttgtgtgagcgaaccgatagcggatgccagcagctttcctggattgataatagcggaacctgcactgttggtccatccggcagaaccgcttaaggtgatttgcggatagaaggctgcacgtgcgctgttggtgtcgtagtagcttgctgccagtgacatttcagcagcttttacatcgggacggttggacagcagttgcaaaggaataccggtagagaattcggcaggtaactgctgctgttccaatgtaccacgtgcaatgctctgtgcgggttggttcagcatcaggcatagtgcgttttccgtttcacggatgctttggcggatatcgggcagggaagccagtacttgtgcataggcggtgcggctttgctctacggctgcactgttagccatagcagcctctttcattgcttctacggtttcaaggttgcgtttcaggatgtcacaggtgctttcgcttatttgcaactggcggtcgagcattagcagcgtatagtacatattggctacgtttgcaatcacttgtgtctgtacagcctgttcatagaactgtgtctgtttcagtgagacttgagccttacgcttggggttcagcaactgaccgaacagatctatctgccagcttgccgtcacaggaagcgaatacgtctgtgtggctttacctttgtcgaagctgcttactgttccttgcggagagagagccagcatgggagcataagccagacgtgcggacatcagtgctgcctgagcctgctttacggtgagtgcagcactgcgaaggtcggcattgttggtcaatgcctgttcgataagtgtctgtaactgtgcatccgtaaacacttctttccagggcagattaccgaaattggcagtatctgcggcaagtgtatcgccaccggcaatggtgtcccgatataggccttctactgtaatatcttcgggtctgtcgtatgatttgtagatatggcaactgctcaataaagcagttgcgcacatcagaattattattttcttcatgataaactatattttagtgtttagcggttagtgtttaataattagtattttgcttgtggatgtccactatccattaatcgttaaacgctaatcactattttgtatattgttcaatctcaggttctgcatccgagttatccacatcttcccattccatcggtttaaccttctcctggagatattggaaagcaacgaacagggcaggtacgatgaatatctgcagaatcataccgattaacataccgccgatagccgaagttcccagtgtacggttaccgttggctcctgcaccggaagcaaacatcaacgggagcagaccgacaatcattgccagagaagtcatcaggataggacgcagacgggcggcggcacccagcacggcagcccatgtaatgctcatacccattttgcggcggtcgagggcgaactctacgatcaggatggcgttcttggccaacagacccatcagcatgataagtgcaatctgcatgtagatgtcgttagacatggttcccaaaatcattttcaatgcaggaatgttacccaatgaaccgataccgctgacaaacaggaagctacccaacaatccgaatggtacggagagcaatacggagagcggaagaatataactttcatattgcgcactcaacaacaggtaaacgaatacgaaacagagcacaaaaatcaaaccggttgtgctaccgctggtttcggcttcctcacgtgccataccgccgagttcgtaggcaaaaccggcaggcaggttctctttggccacttctgcaatggcagcaagtgcctgaccggatgtataaccgctggcgggagccaccatcactttcatggatgtgtaaaggttgaaacggctgatgatatccggaccgtataccttcttgacggatacgaactgggtgatgggagccatctcattgccgttacgtaccttgatgctggagagtgattccagatttttggttgcattcggttctgcctgaatcatgacacggtacattttaccgaagctgttgaagttagaagcgtaaagtccaccgaaatatccctgcatggtgctgaggatgtcgcttgggctgagacctgctttcttacaggcagcagcatcaatatccaacatatattgcgggaagttagggttgaaactggtctttgcggagttgatttccggacgtgcttccagtgcggcagtatagtcgttcactacatcgaagaagtggttcaggtcgccaccggttttatcctgcatgttcagttcgatatcgctggatgccgaataacccggaatcataggcggagcaaagaacagtacctgtgcttccttgatgattttttgcgcacgcatgaaaagtgtggcgtaaactaccgttgaattctgcatagtggaacgttcttcccaatttttcagcttgataatgagcgaaccgtaggaaggtccctgaccaccgatgaagctgaaaccggaaattaccgtacgcgattctaccgctgggtcggctgcaacgagactgtctacacggttcagcacttccatggcacgttcttgtgaagtaccgggaggaagcgttactacacccatgatggtaccggtgtcttcgttgggcaccatacctgtcggtgtgatgttcataaacaccatcaacagtacaatggaacctaccacaataccgccggagagccatttcttctggataaagcggagcacttgtttcttgtatttacccaggatggagtcgtaggatgcgttgaaagagtgtttgaacttatccgtagtcatacctgctaatgccaatacgctgataacgatcattaccagacagagtacaggatggttctcaaagttgaacaaaccgaaaatcatacccaaaatggcgattgtagtaaagagcagtgtaaggccgggacgcatcattctgccgatagaatccacataacgggctatcatgattttacgtgcctctttagttgcgacaccgatgcgttctttcatggtggcatcactgttgtgcggtttcaggaagatggcacacaaggccggactcagtgtcaaggcgttcaatgcggagaaaccgatggcgatggccattgtaagaccgaactggcggtagaatgtaccggctgtaccacccatgaaacttaccggcacaaacacggacatcatcactaatgtaatggaaatgatagcgccgcccagctcgctcatggcgtcgatagatgcagtccgtgccgatttatatccctggtcgagcttggcatggacaccttcgacgacaactatggcgtcatccactacaattgcgatggcaagcaccatagccgagagtgtcagcaggttaatactgaagccgatcagttgcagtacgaagaaagtagcaatcaaagctaccggaatggcaatggcaggaatcagcgtagagcgcatgtcttgcaggaagatatacactacgatgaacacgaggatgaacgcctcaatcaatgttttgattacttcatggatagaagcgaacagaaagtcattggcactttgggcgatattgattttcaaaccggaaggcagcgtttcggatgcttttccaagtacttcttccaggtcactgatagtctgcgtagcattggttcctgccatctggtatacgatacaggatactgccttatggccgtttaccgtattattgaagttgtaggacagacgtccgagttcaatatcggcaatgtctttcaaacggagaacttcaccgttctcaagggctttgattacgatattctcaaattcttccggctgttgaagacggcctttgtagcggatggtgtattggaagctttggttgccgcgttcaccaaactgtccgggagccgcttcgatattttgttcggccagtgcaccggctacatcgttaggaatcaacttgtattgtgccattacatccggtttcagccagatacgcatggagtagtcctgaccgagcacggtggcatcacccacaccgtttacacgctttacttccggaataaggttgatgttggcatagttctcaaggaattcgatgtcgtactggtctttctcatcgtaaatggagaataccatcaacatggatgtctgtcgtttctgcgtagtcacaccgactttggttacttcggccggtagcaaaccctgagccatggaaacgcggttctgtacgttaacggctgccatatcagggtctgtaccctgtttgaagtaaatggaaatttcggcggaaccgttattggatgcactggaagtcatgtacatcatgttctccacaccgttgatttggtcttccagcggcgcaatgacagagttcaacaccgtttgggcgttggcaccctggtaagtggcgcgtaccgataccgtcggtggtgcaatgtccggatattgggtgataggcagcgttgccagaccaataagtcccaggattactatcaggatggagattaccgtagatagtaccggacgattaataaatctatctaatttcatgttacttaatgattaggggcgttaaatgttaattgaacgcagtttggatattaccttctttttggtctttgagggctttctgatattcagcctctttctcttcaggagtgataggagtgatgctttgtccatctttcaggttctgtacgccttctatcacgattttatcgccggccttcaagccgtctgtaacgtaaaaatatttgccatcattcaggctgaatacctgtatttcggtatttttcagcgtgttgtcaggttgtgcaacgaatacgaatttcttgtcctgtatttctgtggtggccgattgaggaatcatgattacattctccatcggattggggaatactacgtttcctgtaccgccgctacgcagaatgttgtgtttgttggggaagagggcacgcatatttactgcacctgtagtctggtcgataacgccgctgatggtttctacacgaccactgtcggcatacatggttccgtcaatcagttgcagttgtacctgaggcatctttgccagaatatccttggtacttccgccttcgcgtatcagtgacaggagctgtctttcggtcatggagaaataagcgaacatttcggagatgtcggcaactgtggtcaacggggtggccatggaggggcttaccaaactacctacacggtaggggatagtacctactataccgtcgctggggcttgttacactggtgtatgacaggttgttttgagcattgatcagttgcgcttccgcttgtgccaattgtgctttggtttgtgccaactggttttcagccatttgcaggtcgtaatcgctgatgatgttcttttggttcagcgtgcgtttgttgctcacagtaagttcttgtgtgtttacagcggcttttgccgtttcaaccgcagccttggccgaatttactgcagcctggtattgtacagggtcgatgctgaacaatacttgtcctttgtgtacgacggaaccctcgtccacatgtaatttggtgatgaaaccgcttaccatcggacggatttccacatcttgtttacctttaatagtagccggataactgtttgtcaggttggcagtggttgtttctactgtaatcactgcaaattcgggtgcttttcccgtgcttttgtcaccttgtccacaactgctgagcagtgccaggcaacatgccaataatactaatctactcttcatactcttttattctctgtataattttattctagttaatccgaagcttttgtgtgtaaatcatagaagaaggataacggtgaaaactaaatcataatgtttagttttcggtcgcaaaattattcttttctccgtatataaggtatgaatttccctcatttttaactatgttttatatatacttgaaggaaatatttgttttttgattaaaatactgtaaagcatactgctaattgcaggataacctttatttttgcatcatgttagattgcaagcatcatattaagatgaaaccgtttgtacgtcggttgttaggggcagctgtaagtgtggctgttttatattcctgtgccagtgtgggccgactggaaggtggtccgattgatgaggagccgcctcattttgtcaccggttctcccctgccgggtgcactccataacaaaaagagtaaaatctctattgagttcgatgagtttatcaaactggagaaagccaatgaaaaagtggttatttcacctcctcaagtgcagcaaccggaaataaaggcaaacggtaaaagggtagtggtcaacctgcaagatacgttaaaggctaatactacgtatactatcgattttgccgacgcgattcaggataataatgaaggaaacccgatgcaggggtttacctatacattttctaccggagcagagcttgattcaatggccattgccggtacgttgcttgatgcatcgaatttggaaccggtaaagggggtactggtaggattgcatgccaatttagccgattcggcatttaccacgttgcctttcgaccgtgtaggccgtacggatagccgtggacagttttccattcgtggagtctctcctggcaaatatcgtatttatgctttaatggatgccgaccagaattttaaattttcccagtctacggaggtcatagcttttaatgactccgttattatcccttccatggaaaggcgtatgcgccaggataccttgtggagagactctttgaccgtagatacgattgtagagagacaatatacccatttcctgccggatgatgtgctgttgcgcagtttcaaggaaaaaaccttctcacagcgtcttatgaaaacggaacgtcttactccggaaaaattctctttttattttacggctcctgccgacagtctgccgctgatgaaagggttgaatttcgatgaaaaggatgcttttgtcattgagcagacaaccgggaggaacgacacgattcactattggataaaagattctttgctttatcagcaagatacattgaggatgagcttgagttatttgtatacagatactttgaatcagttggttccccggacagatactttgagaatcgtatcgaaggtaagctggcagaaactgcaggaaaagaaactggaagagaaggaaaaagccgagaaggagaagaagaaaagaaggaaaaagggtgaagaagagccggaaccgactcctttccttgcaatggatgtgtatgcgccttcggcaatggatgtatacgactatatcacattgagctttacggaaccggtagccggctttaatgatactgccttgcatgtaaggcagaaggtcgatacgctatggcaggatgtgccgtttgactttatgcgggattcgttggatttgaaacgttataatctgtatgcagactggaaaccgggtgaaagttacgtttttgaagtggactcgactgcttttcacgggttgtacggtttgtttaccgataaagtgaagaaggagtttactgtaaagaaactggaagagtacggacagatatttttcaacattaccggagctgattctactgcatttgtagaattgctggatgctcaggacaaggtggtacgtactgttccggttgtagaaggaaaagcggatttttattatttgaatccgggtaaatatggagcccggctcattaatgatacaaatgggaatggtgtatgggataccggtgattatgctgccaggcgccagcccgaaatggtttattactatccgcaggtattggaatttaaggccaattttgatttgattcaggactggaacgtaaaagaaaaaccgttggataagcaaaaaccggatgaactgaaaaaacaaaagccagatgaagacaagaaaaagaagaaaagccagaataaccgcaacaacagcaaccgtaacagcggtaggggatatagttattaaacggaagcgggctgcaggattgtttttgctggccggacttctgtgtctgtgcagcataatgcctgtgcaggctcaatgcgtggctaagaacgaagcgtttcagtcgggcgaacatgttatgtacgatttgtatttcaactggaaatttatctggaagaaagtagggctggcaagcttgactactaatgctactacttaccgcttccagccggcctaccgtttcaatcttctttctgtgggcagcaagaaaacggattttttctttaaaatgcgcgatacgctgacttgctatgtcagcgataaactggaaccgctttattttcgtaaagcagccgaggagggaaaacgctatacggtcgacgaggcatggttctcgtatgatgacggtatagctaccgtaaagcagagacgtacctggcataatcccgtgcgtgaaccgcaggagatggagtacagcgacagccgctgtatctttgatatgctgagtattttggcgcaagcccgttcttataaccctaaagactacaagataggcgagaagatacttttccctatggcaacagggcgcagagtagaggagcaaaccttgatttatcgcggaaaggaagatatagaagcgaataatgatacaatttaccgctgccttgtattctctttcgtggagtacaagaaaggaaaagagaaggaggtgattactttcttcgtttccgatgataagaaccaccttcccatacgtttggatatgtatttgaatttcggctctgcaaaagctttcctcaaaagtgtaagggggaatcgttacccgatgacttccgttgttacaaagtaaacggcagtgcgtctccttttctgaagatacttgactcgaatgtggctaccagctcaccgttctggttggtgatgtcaatctgataatgtccggtagtacgtccgatgtaccgttcgcgggcttcggcatataatatgtcgcccggaccgctgctacgcaggaaagtgatattggaagacagtgagaaagccagtgtgccgtgagaattggctgccgctgccaaggcgaggtcggccagtgtaaaaagcgctccgccttgggtgcgatttccggcattgagatgtgtttccgtaatcaccagacgggctttgctgtatccttcttttatttctatcagttctacacctgctttatcggcaaaacagtctttcttgaaaaattcttgcggcgtcatgtcgtttggtaataaatgattaatattaaggagaaatctgatgttttggacacaaatgtaatattttagcttttaattggataatttaggtgggttattttcgaaagcatgcactacttttgtcttcgaaaaaatagacataattaataaataaatcccttattatgaaaacgactcttactacattgggtattttccttcttgttttagcaggttgtgcaggacaaaaacagactgcaaatgatttcattcaggagaatattgataatgcggtggcacaggaaacacttcagacagacattatcgaaaaatctggcaaaattcttaatccgcgtaccattaataaggatggtagcattcactacgttcctatcgacgactggtgctctggtttctttcccggtaatatttggtatacgtacgaactgaccggtgataaaaagtggttaccgctggcagagaagtatactgaagcattggattccgtacaatatcttacttggcatcatgatgtaggctttatgattggttccagctatctgaacgggtatcgttttgccaataaggaagagtacaagcccgtaattatccagaccgctaaatcattgtctacccgttttcgtccgggtgcaggcgttatccagtcttgggatgccgacaaaggctggcaggccgaacgcggatggaaatgtccggttatcattgacaatatgatgaatttggagctgctgtttgaagccactaaactttcgggcgactctactttctataatgtggctaagaaacatgccgacacgactatggccaaccacttccgtgcggacaacagttgttaccatgtggtggattatgatccagagattggtgaggtgcgcaaaaaacaaacagcgcagggctacgccgatgaatcgtcttgggctcgcggacaggcatgggctttgtacggttatacaatgtgttatcggtatactcatgatgccaaatatctggcacaggcagaaaaggtgtataactttattttcggaaacaagaaccttcccgaagatttggttccttactgggacttcgatgctccgaagattccgaacgagcctcgtgacgcttctgccgcagcatgtacagcttctgccctctatgaactgagtacctatgttaccgataaggggtataaggaaacggctgacagaattatggaaagtcttgcttctccggcttatcgtgcagaggtagggacaaacgggaactttatcctgatgcactcggtcggcagtattcctcacggtgctgaaatcgatgttccgctgaactatgccgattattatttcctggaagctttgaagcgtaaaagagatttggaaaaatgaaaagtcaattgaatatattgttaggtggtttaggcttgttcgccttgcagggttgtaaaactccgcaggcagagcaggcccaacagccgaatgttatttatgtttttcccgaccagttccgcaatcaggcaatggagttctgggggcaggagagttttcgggagaaagtgaatttccggaatgatccggtgcatactcctcgtctgaatgattttgcgagagagtctttggtactgacctctgccatgagcaattgcccgttgagcagtcctcaccggggttcgttactgacaggcatgtatcccaacaagagtggcattcctttgaactgcaattcgaaccgtcctatcagttcgttgcgtgaagatgtagactgtgtgagcgatgtattcagcaatgcggggtacgactgtgcttatttcggtaaactgcatgcagacttcccgacccccaatgacccccagcgtccgggaaaatatgtggaagaccgcataccagcatgggatgcttatacaccgaaagaccgtcgtcacggatttaactattggtatgcttacggaacttttgatgaacataagaatccgcattattgggatacggacggtaaacggcatgatccgcgcgaatggtctccgctgcatgagtcaggtaaagttatttcttatctgaagaatgagggaaatgtacgcgacccgaagaaaccgttctttatcatggtcggcatgaatccgccgcatagtccctatcgttcgttggacgactgtatggaacaggacttcaacttatacaaggatcagccgttggacagcctgctggttcgccccaatgccgattctaaaatggcaaaggcggagagtgtacgttactatttcgcttccgttacaggtgttgaccgtgctttcgggcagatactcgatgcgttgaaagaactgggattggataaaaacacaatcgtggtcttctcttccgaccatggtgagactatgtgcagccagcacacggacgatccgaagaattctcctttctccgagtcgatgaatgtgcctttcctggttcgcttccccgacaagattcaaccccgtctggatgatttgatgctttcttctccggatattatgcctactttgttggggttggcgggtctttccgattctattccggcaaatgtgcagggacacaattatgctccgctgttctttaatgaaaaagctgatatagtgcgtcctgcaggagctctttatattcagaacgtagacggtaagaaagatgaagacggtaaggtccgttcctattttccatcgtcacgcggttttaaatcggcccgttacacattggctctttatgtagaccgtgataatcacaagcttgtaaagagtttcttgtttgacgacgaaaaagatccgtatcagatgaataatcttccgttagaggagaataaggaaatagtagatgagctgtgtgcagagatgggaaaagtcttgaaggagattgacgatccctggtacagagagcgcattttgtcggacatgataccgtacgataaataaaaattgttgtttctaaactgaattacccctgccacaatcatatgtagcaggggtaattttttggaggatatgatgcacctctttctttcgtttataggaaacggttataaccgttttgagtttacttgtttaatttccactcacatccgtccttggtgtccttgatggcaaagcctaatgcagtcagttcatcacggattttatcggaagtagcccagtccttgttggctttggcttttatacgctctgccagcaacatgtctacaactttaccgaaagcggcttcgcgttcttcattggaggtgttctcctctttcagtcccaatatatcgaagcagaagagatggaaggtctctttcagctctttcaggtcttcggctgtaatggtgtcattgcctgcaatgatattgtttatcattctggcaccatcgaagagatgggctattacaatcggagaattcaaatcatcgttcatggcttcatagcattcggcacgtaatgttttcacgtttaccgtagaagctttgcctggaacaatcttctccagtccgtgtacagcatccataagccttgccagacctttttctgcagcttgcagagcttcattgctgaaatctaccgtactgcgatagtgggcctggagaatgaagaaacggatggtcatcgggctgtaagcctgtgtcagcgttttgttggagccggtgaagaactcatccaatgtgatgaagttgccgaggcttttacccattttctgtccgttgatggttatcatgttgttatgcatccagtaatgtaccatgtcatcgccttgcgatgctacggattgtgcaatctcacattcgtggtgcgggaagataaggtccataccgccaccgtgaatgtcgaaatgtttacccagatatttctttcccattgccgtacattcggcgtgccagccggggaagccgtcactccatgggcttggccagcgcatgatatgttccggttgggcacgtttccacagtgcaaagtcggcgggattgtgtttttcctcctggccgtccagctcacgcgtagtgtttagtacatcgtccagattacgtcctgacagtttgccgtagtggtggtctttgttgtatttggctacatcaaagtaaatggagccttcactttcgtaagcgtagccgttctccagtatctcttttacgagctctatctgttcgatgatatgtcccgatgcatgcggttcgatgctgggagaaagcacgtttaatgcttccattgccttgtgataacggtttatataatactgtgccacttccatgggctccagttgttccaaacgggctttctttgcaattttgtcttcaccgtcgtccgcgtcatgctccaaatgacctacatcggtaatattgcggacatagcgcactttatagccaatgtgtgtaagatagcggaaaagtaaatcgaaagtaatggcaggacgtgcgtggcccaggtgggcatcaccgtaaacggtcggtccgcagacatacatacctacatgaggagcatgcaaaggtacgaataactccttttttctatttaaggtgttgtaaatggtcagttgttgttccataacgtttgataattagttctttttggaaaggcaaaggtataacaaatatttgtaaattaggactatctgtttttaaaaagcgtgcaggaagtatcgttctacggcgatggctactccatcttcgtcgttacttggggcaatgtagtccgcagcagctttcacgggttcctgtgcattgtccattgctatgccaagtccggcgtattttatcatgctgagatcattgtaaccgtcgcccatggctgccacttcttcgcgggtgatacccagcttttccgataatacggcgatcgaacgtgctttgtctatgcccaaaggaacgagttccagaaaataaggttccgaacggtatacgctgatttgcctttgcagacgaaggctcagttcggcttctgttttcataagttgttcaggttcacctacaatgaggcatttgggtaggggaaggggaatttcctgcaggaagttctctacgcggcgtacctgcattttgttgaggaatgcttctttttgtacgtacgggtcgttgggattttcggtaagtatgcattcgttgtcgtatgtgaggattgtttgccggttatcggttgcagtctggtacaggataggcagtacatcgtcgggaagcaggtttttatacagtagctcaccggtgctccagtctatgatttctccgccgttataagaaagaatatagccgttgttttctttcatttgcagttgttccgccaaaggaacaataccgtaggtaggacggcctgacgccagtaccaggcgtacgccgctttgctgtagccgtaacagggtacggagattgcgcggagagatttctttcttcgaattggtcagggttccgtccaggtcgaggacgagcagtcgatagtcttgtttcatggtttgaatttgattgtttttttgaaagtggcaaagatagggttttctcaggatgaaatactatttttgcagtatgaagtcaaaagaacgtgtattattgggaatgagcggcggtacggacagttccgtggctgccatgaagttacaggaagccggctatgaagtaatgggagtcactttccgtttttacgaagtgggtggaaaaacggaatatctggaagatgcgcgggcgctggcaggacggttgggtattgagcatattacatacgatgcaagggaactcttccgtgaacgcattatccgttactttatagatgaatatctggcggggcatacccccgttccctgtaccctctgcaataatgagctgaagtggaaacttttggcggaaatagccgatgaaaaggggatttattggatctctaccggacattacgtacgtaaactctttttagaggacaactattacattgctccggcagttgacagagacaaggaccagactttctttttatggggcttgaaacaggatatcttgcaacggatgttactcccgatgggagatatgacaaaagaggatgcgcgtgcttatgccgctgaacgtgggtttatgcgtgtcgccactaaaaaagacagtataggagtgtgtttctgtccgttggattaccgttctttcctgaagcgtgaggttcctatggagcaactgccgggcagagggcattttctcgatgaaaaggggaatgtattaggatggcatgaaggataccctttctatacgataggtcaacggcgtggactgggcattcatctgaatcgggctgtatttgtgaaggaagtcagaatggaaaccaacgaggtggtacttgcaccacttgcctccttatataaaaaggaaatgtatcttaaagattggaaccttatcagtgcacatcgggtattgggagcggaaacggttatcgtaaagatacgctatcgcaagcaggcaaaccgctgtatggttgctcaggaggggaacggatatctgcgggtttcgctattggagccgttggagtctatcgccccggggcaagccgccgccttttatgatgcggacggcttgttgttgggcggtggtattattctttgaagttgagcttcagcatctcttccatgtattctcttgtattgctgaggcgcggtatcttatgctgtccgccaagcttgcctttactgtccagccaatcgtggaacagatttctgcgggcaacgattatctccagaggctgcaaagccaggtcattctgtcgtttggcttcatagtcggaattcacctctttaagggtgtcatccaatattttggcaaatttatccaggtcatctggcattttggcaaattcaatcagccattgatggcggcatttggcatgttcgtccatgaagacgggagcggcggaatagtctacaatctgtgctcccgtggcagcacaggctttgcttaaacctttttccgcattgtccacgataagttcttcgccaaaggcattgatgaaatgctttgtgcggccggtaatgacgaatttgtacgggcggttattggtgaacttcacggtatctccaatcatataccgccacagtccggcagaagtggagatgaccattgcgtagttcttgttgagttctacttcttccagacagcagatacgcggattttccttgccgacatcttccaaaggtatgaattcatagaaaacaccgtaatcaatcatcatcagcatggccggatcgttcgggtcgttctgtgtgccgaaatagccttcggaggcattatatgtctcgacatagtgcatcttggaacttttgatgacttgtctgtattgttcccgataaggagtaaaagccactccgccatggaagaatacttccagattgggccatacttcttccaatgactgtttcccggttttttcaagtatatgtttaacaagtaccagcatccaggatggcacacccgaaagattggtgacattggcatggattgtactgttggctatggcctccatcttaggttcgaactcgctcatcaaggctatttccttgcttggcacacggatatagttgaccagcgggtgtacattctgtatcagaatagcagataaatcacctaccaaactatggttggagttcaggttgggactgtggctaccaccgagaatcaatccttttccggaaaaaaaacggctttcgggattgattcccagatagatggcaacagcatctttcccgccttgataatgagtgtcttgcagagactctttgctgaccggaaggaatttgcttttatcgttggttgttcccgaagacttggcaaaccagcgtatttccgacggccagagcagattttgctcaccggcacgcaagcgggctacataaggtttgatttcttcgtaagtctgtatgggaaggcgttttttgaaatcttcataagtacgaatagaggcatagtcatatttctttccccattccgtattggcggccatgcgtaccaaacgtttcaggacacctgcctgtaactcacctgcatgttcagtgtacagttcgatttctttcaagcggggggcgaagtatactttattcagaagttttgtaatattcatcgttcttatcgaaatctgtttaagtgtgcaaaattaatcttatttatcggcatctctatcttttttctcttttttttctatctttacgtccgtataggtgaaaagaaccgtaatttaaactaaaacatcatgagaatcggtattttgacttcaggcggggattgccccggtatcaatgcgactatccgcggcgtttgcaaaacggctatcaatcattatggaatggaagtaataggtattcatagcggttttcaaggattattgacaaaagatgtggaatcgtttacggacaagtctctgtccgggttattgaatttgggcggtacgatgctgggtacttcccgtgaaaagccgttcaagaaaaacggggtggtatccgatgtaaacaagcctgctttgatagaacggaatgtaaaggaactggggctggactgtattgtctgtatcggcggtaacggtacgcagaaaacggctgctaagttggctgccatgggcttgaatatagtttccgtacctaaaaccattgataatgatatttgggggaccgatttttctttcggttttgattctgccgtcagtattgctacggatgccatagaccggttacactctaccgccagttcgcacaagcgggtgatggtgatagaagtgatggggcataaagccggatggattgcgttgtactccggtatggctggtggcggtgatgtgattttaattcccgaactttcttataatattcataatataggtgatacgattctgaatcgtctgaagaaaggaaagccgtattccatcgttgtggttgccgagggaatccagacggacggcaagaaacgtgcagccgaatatatcgcacaggagattgaatacgaaacgggtatcgaaacccgtgaaacggttttggggtatatccagcggggtggttcgcctacgccttttgaccgtaatttgtcgacccgcatgggagggcatgctacggagttgattgcaggcggacagtttggacgtatggtaacgctgaaagggaatgaaatatcttccgctcctttgggggagatagccggaaagctcaaattagtgaccgaagaccatgatttagtcgtccagggtaagcgtatggggatttgtttcggatgatttgaccgtatcttgtgcagcatccgcaggttccgtataatctgtagcttcaagaacttctgatgtctctacagcagaagcctcttctgcgacaatttgggtttcctctgttgccatattttcctttgccgcgtggttctgtatcttggctgtttcaatagcttctttgaaggcttcgtcactcttgattttcttcaatgccatttgtgcggcattttgctgtgactcctttttggaatagcctgtgccagtaccggcagaaaggccctctatgcggacttcggtgtggaacatcgggttgtaatcctggtcgaggaattgctctatcaactcaaaggaaacctccattttggttttctggctccattcgataagtttggacttgaagttgacttccttgcgcgacatcttgtcgaggtcgatgtagttcttgaggatttttttctccatgaactgcttgcagcgttcatagccttggtctaaatagatagctccgataaatgcctcgaaagcattgccgtacatatagctgttgtgcgacgaagaacgggtggaatacttaaccagtttgtccagccctatttctacagccagtttgtttagagtttcccgttgcacgattttagaacgggtattggtaagaaagccttccctgcgtccttcaaagtgcttatatactatatcaccgacaatggcatccaaaatggcgtcgcctaaaaattccagccgctcgttatttaacggacgtcctttttcggaacggatggaagtggatttgtgaagcagtgcctgctcatagaaccggatgttacggggaaagaatccgagtatcttataaaaacaaaaataagactctctgtccttatggaataagagccttattttatctatttgattacgtaacacgaccgtattattctgcgtatttcttgaaaataacacatgcgttatgaccgccgaatccaaacgtgttggacaaagctacattcacttcacgcttctgagccttgttgaacgtaaagttcaggtcatagtcgatgttttcgtcgttatcaccctcttcgtggttgatagtcggaggaataatgccattcttgatggcaagaatacttgcgatggcttccaccgcaccggcagcacccaataagtggcctgtcatggatttggttgaactgatgttcaactcataagcatgcttgccgaatacttcctggatagctttcacttccgaaatatcaccaacaggagtagatgtaccatgaacgttgatgtaatctacttcttcgggtttcatttctgcatcttccaacgcatttgtcattaccagtttggctcccagaccttccgggtgggaagctgtcaggtgatgcgcatcggcagacatacctacgccggcaacctctgcataaatcttggcaccacgtgctttagcgtgttccagttcttcaagaaccagacagccgccgccttcacccatgatgaaaccgtcgcggcttgcgctgaacgggcgggatgcagtctccggagagtcattgcgggtagataaagcgtgcatagcgttgaagccacctacaccgcaggctgcgatagctgcttccgaaccaccgctgatgatggcatttgccttacccaagcggatgaggttgaatgcatcggcaatggcattggtagaagtggcgcatgcagaacaagtcgcatagttaggaccatgaaaaccgtacaggatagaaatttgtccggcagcaatatccgaaatcatcttggggatgaagaacggattgaacttaggaccgttttctttatggagggcatagttacctgcttcttcttcaaatgtacggattccaccaataccggcgccaaagatgacaccgatcttgttcaaatcctcattttcgacatcaagaccggaatcttctaccgcttgcttggctacaccaatggcatattgggtatacaagtccatcttgcgtgcctctttgcggtcgatatattgattggcatcaaagtttttcacctcgcatgcgaattgggtcttgaaaagtgatgcgtcgaaatgagtaataggtcctgctccactaaccccattcacgagattttcccagaattcgggtactgtgttgccaatgggagtaatggcgccaagacctgttactacaactctttttaattccatactaagatatgaatggattaagattacttagcgtgttcttcgatgtaagatacagcatcacctacagtaccaatcttctcagcttggtcatcaggaatagagataccgaattctttttcgaattccatgataagttctacagtgtcaagagaatctgctcccaaatcgttagtgaagctagcttcgttagtaacttctgattcttcaacgcctaatttgtcgacgataatcgctttcactcttgatgcaatttcagacataactttaagtttttaattaataattagttttatttctttaaatttgcggtgcaaaggaatgaatatttatcgttcctcgcaaatatttgatgaattaaatgcacctttttgcacatttttcacggttttgtgcaggatttggagggcttatgagtaaaaacattgctattttcgcttccggtaacgggacaaatgcagagaatatcatccgttatttccaaaatagcgaatcggtgaacgtaaagctggttttggcagatagggagactgcctttgttttggaacgtgcacgtagactgaatgttccgtttgcctgtttggacaaggccgcatgggcggatggtacggttgtattgtctttgttggaagataaaggaatagattttattgtccttgccggtttccttgcacgtgtgccggactgtatcttgcatgcttatcctaataaaattataaatattcacccttccttattgcctaaatttggcggtaagggaatgtatggcgggcatgtgcatgaagctgtggtggctgccggtgaaacggaaaccggtattaccatacattatttgaatgagcatttcgatgagggcgaaattatagtgcagtacaaatgccctgtcctgccgcaggatacggcagaagacgtggcaaagaaagtgcatgcgctggaatacgaatattacccgaaagttatcggcggtttgttgtcggaagtgtgctgataacctttcgggatattgtttttgcggaaaaaagcggcatgctattccggatgattcacaattgtgtatgcttctttctctcttcttaaaggatagtctccccgtaacttctcaaatagttccggatgcgttttgagcgcattgctgtcttgtcggggatcgtacatttgtagataggcggccgatagggtatctgctgtaatgcgcggttggcttggggcaggaggaataatctgatagtctgcctgtacattgaaataccggcacagggcatccagcgacatgcgggttgcattggctttgccgtctgccgaatagccggcgatgtgcggtgtgccgaggaataccttgtccaataaggtgaggtttatagccggttcattttcccagacgtcaatgatagcatccgaaaccagccctgtttccaaagcgttcagcagtgcaccggtctcgattatttctccgcgtgaagtgttgatgataacaggcttccgctttagcgattggaaaaaggcgtcgtcggcgagatggcaggtcttgtatctgccttccttatataaaggtacgtggaaagtgagtatgtcgcattctttggcaagtgtttgcagggacgaaaagccttgtttcccttctttgtcctcacggggaaggtcgttcagtaaaacgcgcatccccaattcctgtgccacttttgcaactttgctgcctacattgcctactccgataatgccgatagtaacttccggtaaattgatacctttcagcgcttgcagcaaaattaaagatgattgcaggtattgggctacggaggcggaattgcagccgggagcatttgtacatgtaataccggcttcgcggcagtattccgcatcgatatggtcgaagccgatggttgccgtagcgataaacttaaccttgctaccttccagcaattcccggttgcaacgagtgcgtgtacggataataagtgcatccgcatctttcaccaaagaaggggtgaagtcttttcccggtgcgtagactacttcatcggctattttttcaatagcttcctttataaaaggtattttatcatcgacaattactttcatgatgcttttgttttattgcaggcaaagttagaaataattcatgagaacagacatttctgatataataatgcatacctttgacagattgtttaaaacataaattgatatactgatgaaaacactgattggctttgaggaaatagaggagaagataattactcttcgcgggcagaaggttcttttggacagggatgttgctgctttgtatggggtggaaacacgggatattaataagtcggttaaaaataatccggataaatttcccaaagggtatattattgagctgaatgatagtgaattaggaaaattgcggtggaaaaattccaccacaaatctttctaaatcaagagtcttgcctaaagcctttacagagaaaggtctttatatgcttgctaccattctgaaaagttctcgtgctacaaatgcaacgtttgcgattatcgagacttttgccaaactgcgcgaactctcccgtaccttgaacaacctgccggatgcttccgaagagcagcagaaatccttgttggagaaaagcggtgatttgttctccgatttattggataataatcttcaggcaacagactcggaaacaacgattgaactgaatctcgccgtattgaaagtaaagcatacggtaaaacggaaagcagataaggaataaatgaggcaaactgtttggctgtgtgcaaaatattgtatagttttgtcaacttgtgggaattttgcagcttgttgaacaaagactaattaattatatccaatgaagtgtattcatatcattactcctgtaaaggactccattgaattgacgttgcaaacggtggaagccattgttgcatccgattttcagatgccgtttacctataccgtatataatgacttcagtacagaagagaacacggctaagttgcaggatgcatccgaaaaactgggctttgaattggtaaatcttgcggaaataacggatcatccctcaccgaactatctgctggtattgcaaatggcacagcaacgtgccatcgaggcggaggcaggtttgataatcgtggagtcggatgttgtggtaaagaagaatacattgcaggctttgttcaacggagcggcagaacgggcggactgcggtattgccgctgccgtcacagtcgatgagaaaggagaaatcaactatccctatctttttgcgaaaggtaaggaaaaccaggtgtttccggagaaaaagcattgcagtttctgttgttccttgctgacattgaatttcctgaaagcattcgacttccatcagttgaaccctgaaaagaactggcatgatgtaactgtttcgcatcaatctttaaaagaagggtttaagaattacctgtttactacgttgccagtattgcatcagccccatggcagccgtccgtggaaacaattgaaatataagaatccgttgaaatattactggttgaagtatacaaaggggttagataaaatctgatatatttatgaaatctgaaatgagccggaaatccgatatgtttcatccttatacattagttattcacccggactttaaggagttgggagattttatcttgtctttgccggaacgttttgagaaaaacgaaggtgtcgttattcataaaggacgtaacgaattgagaaagatggaatatggcggtcgggagtatgttgttaaatcttttcaccgcccgaatatcattaatcgctttgtgtacggtattttccgtccatccaaagcgaagcgttcttacgatcatgccgaactgtatcttaagataggggtagggactccgcaaccggtaggatatttcaatgtgcgcagcggccttttattcgataaaagttactatgtgagctgtctgtcaacatgtccgtatgtctataacgacctgttcaggcggaagtttgactatgaagaggaagttttgcgtgagatagggcgggtaactgccgttctccacgaacatggatatgcccataaagattacggacgtgaaaatatcctgtttcagaaaacaccggaaggcattaagctggagattgtcgacttgaaccgtatgtttgtcggaactatcggcatgaaagccggttgcaagaacttcgaacggttgccggctaccccgcagatgcatcgctggatggcggaggagtatgcaaaggcccgcggtttcgatgtggaaaagtgttttgagctgatggttgcttacagaagtactcagccgggaaagattgataatctttattaaaatcgtcatgaatattatagccgtagttgtcacttataatcggatagaactgttgaagagaacggttcgttgcctgcaacagaataagcctgtttcctcaattgtagttgtcaataacggcagtacggatgctactgccgaatggctgaagacccaatcgggacttaccgttatcaatcaggctaatgtggggggctccggtggtttttacaccggtatgcagtatgcatatcaggcaggtgcggattggatttggtgcatggatgatgatgtttttccgcgtgccgattgtctggaacggttattgcagcatgccggtcgggaagatataggtatacttgctccgcgccgtttgcaggaggggaagcttttcacgcatgagtttcaagggtataacttgacgaatccttttgcttccatgtacaccgggaagctggcgaaacagactgtaacagggcctgtggagatacaaggagcggcttttgagggaccgtttatccggcgtgaggttgttgggaagattggctatcccaataaggatctgtttatcttttgtgatgatacggactattgtctccgtacggtacaggcgggattcagaatattgtatgttcctgatgcgctgatggataaggagaagtttttctcgaatgacagttggagcgaacggagtaagaagaaaaagtggaaacgtttctatcaggtacgtaattccacttatttgagtcatcattatggacgtaattgggcagtaaggtatcttcgtggttttaatggagtggcgggctatattttgacggcgcttgtcacttgtccgtttaccgatgcttaccgatggagtgatatccctaaactgtggaaagcttattgcgacgggatacacgaaaggctggggaaaatagactgattgaccggttgtcagaatgccttatcggtcaggagatgggcatagattgtctttctcccgttgcgggtttgcatggcaaatgctttcttgtaagtcagcttgtggaaatggtatttggtataaaacgtttccattgcttttttatcatattcctggtttaagcatttagaaagattactcatgggctgtaccggaatattattcaccattttcgatacggcaggaatatgtttgtatgctaaggcaaagaggtaatcgataaaaagataagttacaatccggttgttgtttttccaataattgtagaaagcatccaggatgaaagaggggagaatattgcctttaccgcaagcaagaaagaaaccggtccatttaccttttactacgttgcagttattggggatgtgatgatggctgtagtatggcaggctcgtgttgattatcgaatctatatcttttgtgagcaatattgtgctatccagccatatgccaccatgccgttttaataaattcattcttagcaagtcggaaaaatgcgtgattgtcatttcgcgtttgtacaatctctgcatgataaagtcgggcattgttgcatattcctgaaaatttttctctgttattaggattacggggtggttgtctgcatgccggcatatggaggaatagcatacttttactatgtcgggcatcttcttttctccttgccaccagcacacccatattggagatgttgcaccgataggttcttccttttggggtgtttgttccttataatggtcaagaacctcatttgtcttatatctgtaaagtataatgagggtaagcagataatgtttgcctttagatataactttttgatctatttttctcaagaataaccttaattctttcatcgtttcagtagcttgtttagaatattccgaatggctttgctaataagtttcaggcggttccttttttttaaggaacagatataggatgctcccaggatggtgttcttatcccggaatattattttgggagttgggggaaccgtccattcttgtgggcggccatattctgtactcagaattttaatttgcttatccagcagatatttgttcaggtaagattcatcatgccagcgtgctgtgatgtttctttttaagtcggtttccgtcataaggctgcattgctctaacagttcgatataggccttgctctcaccgccgattagtccgccttgataatagtgctcgccgctgttgtatggtatgtatgcttgtgaattttttcttcgctcataatgatatttttgcaatggtttgtttctataggtgtgccattccaaaccggtcaatgcctctttctcggtcggtaaaaattcttcgggggttattatttgcagaaactctgtattgccattgaaaaagaacagataatcaaaatgtttgagttcttctttgtgccttaggaacatttggtagcggaacaggacattttggggccagcccaaatcttcctggaacgaaacttgtacattagtgctgctttttaacggataatcggtgaatatgaagtatttcttttcatattgaggaagaaacatcgattcgcaactggaatagaacttatcccaaagtcggatatattttccgatacccacataaagaataccaattttcataatttattgtatgctgtcaggttgattaatcggtacttttatccatttgtcgggacagatgtccggtgtttcgcaatgccggaaccagcgttcgggcatgatgacggttttattttcccgcgggttcagccatgctccccaccagctgaacgtactgttacagataatgtggtggcggcagcggctcatcagcatcatatcctgccagctttctgcacctttgttccagtcgataaagaaggcttttggcaacggcaggttttctttcacccaggcaatgtcgtccgagaaaacatagtaggagggctggcttatccgtttgttcatttcggctatggcgttgaggtaataaggcagttggcatacacagccggttgttttccaatatttgggttccaggtaatctccccggcgtacatgtatggaaaccgcattctcatcatggtctatctgttcggacatttcctttgttttcctgttggacaggcgcggattgaatgtaaaagccttgcgtatatcgtctgccatgtcggcaaaaaaacgttccgactgatagaaacccttgaaatataatagaggccagaaatactttttgtcatatggaacaagacttgacgggacttgcttgcgttcatagattttcttgaaaaatagaaattcaataaccttttttaagggttggttgatacggaattctattgggggaagattgaaaacccgatgcatctcatagccgttatgggctttgtagtgcaccatatcggataaatcaatccgggtattgctgtaatgttttttcatccgcatatagaaggcgtagataaacatttgattgcccagtccgccggtcattttaataaatctcatatctctgtttttgaggaaaatgttttttaaacgttcgtttaaaaaacatcttttcaaacgattttaaattgtttctatttgtatatatttataactgtattatatgtgcgtatcctcagattgatacatttttatccgtaaatgcgaaaaaaacgagtcacaatattttttagataggaaataacttttatctttgtgttttttaaacgaacgtttaaaaaacatttcttttgaccataaaacggtattagatgagtgatagtctgttgtataagcttcgtagcggcaagcccccgaaggtattcttctttttaaagggatatttgaagcggtgcatacccgattgctttttcagaatccggagaaagagctgtttggcacaagtggaggcgcggcctgataaggattacatttatgaaagggtgaattattataataagatgcagtatccggtagacctgcccgatacaatattgcatgagcataagcatagctattatgtctatctggacaagataaagaatttccgtccgtctacgtttcacaaggcatattattttgatttgcaggatgtggcccgttggtttgaccgccaactgtgcatcagctatattcccggtgacgtatattttactcccgaatacccttcgattgtaaagagccggctgctgaaggaggacaatgcgtattcggttgtgcttaaactggacaaactgcgtcattttatatttctgaacgatcctgtgcctttttcacaaaaacgcaatcaggctatatttcgcggaaagattcgccttagccgcattcgtgagaagttccttcaaaaatattttggctcatccatttgcgattgcggcgtggtgggcaggaacgaaggttatcctgaggagtggatgactcccaagaaaacaatccgtgagcatcttgattataaatttatcatggcgctcgagggtaacgatgtcgcctccaacctgaaatgggtaatgtcgtccaactccattgccgtaatgacgcgtcctacctgtgaaacctggtttatggagggaaagctgattcccgattatcactatatagagattaaggatgacctttccgatttggaggagaaactaaactattacatcgctcacccggcagaggcggaacagattgtcgagcatgcccacgaatatgtttcccaatttttcgatgccggacgcgaacggctgatttcattgcttgtaatggataaatattttcaggtaaccaaacaaacgtcaaattgttaacaccattgtatgatacatattgcttgtaatattgatgctaattttatacagcactgtgctgttacgctggtttctctgtttgagaataataagcgtgccgatatttgtgtgcatattgtagctccgtacctttcggaagcggatcaggctattctacgcaacctggctgctccttatggcaatgaagtctgcttttactatcctccgaaagatctgttgcaatgcttttccataaaaaagttcggcaagcggatttccatggcaacttattaccgttgcatgttttcatctattctgcccgagagtttggagaaagtactttacctggactgcgatattgtaatattgggagatatttcagaattctggaacacggatttgtccgggtgcggtgcggcttgtgtcgaagatatcggcaaggatgaggatgagcgttacgaacgcttgcactatgataagtcctgctcgtatttcaatgcgggggtactgctgattaatcttgattactggcggaaacataaggtcgatgtgcagtgtgtgcggtatttcgagacttatccggagcgcatccagtttaatgaccaggatttgctgaatgtcgtcctatgcaaggacaaggtctttgttcctttgaagtggaacatgcaggatggcttttatcgctacggcattgacaaacgggtagccgactggcaggctttccgtgaagaactgctgcatcctgtcattctgcattataccaacaagaagccctggaattatgacagtatgcatccgttgaggaatgaatactataaatacctggatatgacgccctggaaagggaaacggccgctttcttctgtaaaagagcgtttaaaaaggtacattaagtgcgtgccttatttgttggggcttagaaaacctaaatatgtgaacctcggcaagtagcagcctgcggtccgggacgcattttgtgaagctgtttgataactgattacgtgagatggtaaaagtttctattgtaatacctgtttataatcggaaaaatttcctgactgtatgcataaaaagtttgcttgcacagtcttttgaagatttcgagatatgtctggtcgatgacggaagtacggatggcaccgggcttctgtgcgacgaactggcggaaaaggatactcgcatcagagtattgcatgtgcaaaatggaggagcagcctatgcgcgtcaaaaaggggtggagctggcaacaggagaatgggtagtctttgtcgactctgatgataccatgcctgccgacgctttgcagcgtttgtttcaagcaacgtcggaagatacggatattgtagtcggtttttgcaggaaaaagcgcttgtggggggtaaacaggctttcgccggcttgttaccgtaagcttttaatcaagggcagatacaacatttcggctacatgcggaaagctgttcaggcgcacgttgtttgatgagtacacgctacgtacaccccgggagattgtgatgggagaagacatgcttatgaacctgcggttggcgtttgcatcatccaagccggtacgtctggttggcggaaacagtgtctataactatatacaacatggcgggaatataacgcatgtattcaaacttacggctgattacgagcacatcttccataaggagaggctgttgtccattcccgaagaagaacatgcccgctatatgcctgtaatgatttaccgcaggctgaggatgctgcgccgcattctgcggtgtgcgcaaaaagacaatacggttgaagagctgcggacttctgcttttgtgaaagagctgcttgcagatatccatgctatccgttatacattctggcgttatccgcactggaggctttggcaatttctcgcaagtgcgggtaagtaaggcggaatcataagctctctttttcccacagccttaatgccgctgccaccgtatcgtccatgtctgcatacgtatattgcgccagtctgccgccgaacagcactcgctcctgttgctgtgcaagttcttgatatttcctgaaaatcaggctgttcttttcgtcgtttaccggataataaggctctttcccttgttcaaaatcatcgggatattcataggtgatgacggtagaacgctgtttgccgaactcaaagtgcttgtgttcgatgacacgggtataaggagtttcgcggtcggtatagttcacgactgcattgccttgaaagtcttctatatccgtgaggtgtctgtgttcgaatcgcaggctgcgatattccaggtgtccgcatgcataatcgaagtattcgtctatgcagccggtgtagagcaccttctccgccaaagcgtccagctctttgcggtgcgccatgtaatcggttccggtgcgcacctcgatgttctccagcaaggcaccgattaaacggttatatcctcccatgggaatgccctggtacgggtcgttgaagtagttgttgtcgaagataaaccggaacgggatgcgccggatgataaatgccggaagctctgttgccgggcgtccccactgtttctccgtgtatccttttatcagttgccggtagatgtcctttccgcaaagtttcagtgcctgttcttccaggttttgcgggtgggttatatgctcgtattccctgcactgttcctgtatctttgcccgggcctctgccggagtacgtactccccacaattggtagaaagtgttcatgttgaaaggcaggttatacagtttgcctttataattggcaatcggagagttggtgtatctgttgaactcaacaagccggttcacataattccatacttccctgttgtctgtatgaaaaatatgtgcaccgtatttatgcacgttgatgccgtctacttcttcgcagtagatattgccaccggtgtgtggacgtttctctatcaccagacatctctttccggctttatgagcctcatgggcaaacacggctccgaacaggccgctgcctacaatcaggtaatcgtatggtttcattttcctttagcgttgtttttatccagctacaaagctacacaattattatcgggattgcagaaaaagtaccggttattgtgccgcgttttgataaaaacagttgtttcacatgcaatcggctggtttttatccgcccggcgcgcaaaaaagaacctgttcgttttattctccccctgctttgtgctatctttgcgcccgatacgaacgtaatgaattaactgtttgaccgaatgaaagaattcttccgactcctgcggcgttttgttccgccttacaagaaatatctgatatgggcattgttcctgaacctgctatcggcaattctgaacatattctctttcgccctgattatccctatccttcagatacttttcaagatggataccaagacctacgagtttattccctgggatgcggcaggaatcaacatgaaagacatagcggtcaacaacttctattattacgtcaccgagatgatagcctcgcagggcggctcattgacattgctgattttaggcgtcttcctggcggtgatgaccctgctgaaagcattctcctatttcgcctcttccgccgtgatgattcctctccgcacgggcgtggtgcgcgacatccgtgcgcaagtatataataaggtgctgcacctgccgctgagtttcttttccgaggaacggaaaggcgatatcatagcccgcatgagcggcgacgttaccgaggtggagacatccgttaccagttcgctggatatgctgataaagaacccgatactgattatagcctatttcggcacattgatagccatcagttggcagctgacgctgttcacgctgctggtgcttccgggcatgggctgggtaatgggcacggtaggcaagaaactgaaacggcagtcgctggatgcgcaggcaaagtggagcgataccatgtcgcagttggaagaaaccctgggcgggttgcgtattattaaagccttcattgccgaaaacaagatgatggagcgtttcaataagtgcagcaacgaataccgcgatgctatcaaccgggtagccacccgtcaggcattggcgcatcccatgagcgagtttctgggtacatgcgtcatcgttatcgtgctgtggttcggcggcacgttgattctgagcaacagcgctactatagacgccccctcgttcatttactacttggtgatactgtacagtgttatcaacccgttgaaggaattctccaaagccggatacaacattcccaaaggacttgcctccatggagcgtatcgacaagatactctttgcggagaatcccattaaagaacctgcccggccgaagcagctcgtctcgctggatgacaaggtggaattcaaggacatcagcttcagctacgacggttcccgccaggtattgaagcatatcaacctgaccgtacccaaaggcaagactatcgcactggtagggcaatccggttccggaaaatccacgttggtggatttgctgccccgctaccacgatgtacaatcgggcaagatcctgatagacggtcttgacatcaaggatgcgcgcatcgccgatttgcgcggcctgataggaaacgtcaatcaggaagccattctctttaatgacactttcttcaataacattgctttcggtgtagagaatgccaccatggagcaggttgtggaagctgccaagatagccaatgcccacgatttcattatggacaccgagaaaggttacgataccaatatcggcgaccgtggcggcaaactttccggcggacaacgccagcgcatcagcattgcccgtgccattctcaagaatcctcccatactgattctggatgaggccacctccgcactcgatacggagtcggaacgtctggtgcaggaagctttggagcggttgatgaaaacccgcaccacgattgccattgcgcaccgtctttccacaatcaggaatgcggatgaaatctgcgtgctctacgagggcgaaatcgtagaacgcggcaggcacgaggagcttcttgccaaagacggctactataaaaagctgaatgatatgcaatctttgggataataccccctctgtgttgtttttcgttttttctcgtcactcatcacctatagcgctctatccctgtcccggaaagggatagaggaactgttgacaacggtgacgagcgtgatgacacattgttggtcgtcaccctctgtcgtcatttttacccttcttctctgttgtaaaatgcttatatacagctacaaaacgcgcatgatgcagaacgtgttaacagcggttaaaatcctctgttttcaggggcggagcatcccaatctctgcgttttaatgtgactgttgcccgttggttttgtcgttttggcgcatgtataatataggaaagcctgatgcaaaacctcgttttccaactgcgggctccccggttgccggctgcgggccgtacggttgccgtatgcgggctgtcgagcccgcaattgcgggacgaagtttcagtagaaggataaggctgtttctgtagtggcataacgacattatcccccgtgtatgcgagggttttgtcatggggatatgggtgttccgccctgctattttcttccgaagtccgcgggtatttctccccactgcctggtttcccatttcaggataggggtggagtaggtgttttcacgcagccatttctcggcgcgctctatcagcaggaaaagttgttcggttttggagtcgcggggtagcttggtcttgcatttcttctgttttacccaaccgatggcattaacgctgtcgctgtaaataggcatgtcaaagcccttttgcttcagcagggcaaggccgtgcacgatggcaagaaactctccgatgttgttggtgccgtacacgggaccgtagtggaaaacctgctggcggctggcaacgtgtaccccccggtactccattgctccgggatttccgctgcatgctgcatctacggcaaggctgttttcaaggacggcggtggggtagggagcgtctgcattttgaggcggcttggatggcgtgctgcctgcggatgtattgcgcttgatgtaatcgtagggtgaagcggcaaaggcgtgctctgcttcctcgcgggtgtcgaacgatttgaactttgccccctcatagcctttggtctgtagctggcattcggtccaggatgtataaatgcccggagtgacgcctgcccatacaacgtagaatttctcttttttcataactgcggcaaaggtacgaatatatttcacaaatgcgaacaatcggctccgttcgcttgttcttttaaattgaggagaagtgggaagtaaaaaaagagtatcggtccaattccttgagtttgtaattttatataactcatttattcttaataagaacagacaataaaataaaaagatatgaagagaacatttgcagaagcgttggaacaccggcgcagttattattccataggtagcgactctcctgttttggatgaggaagtggtgcatattatccgtacggcggtgaagaacgtgccgtcggcctttaattcgcagtcaacaagaatcgtcctgctgctgggcgacgagcataagaaactatgggatattgtaaaaaatacgttgaagcagcgcatttcgcctgaggcttttgcaaagacggaagccaagattgacggctgctttgctgccgggcatggcactgtgctttattttgaggacacaacggttgtaaagaaattgcaggatgcgtttccctcttacagcgaaaactttccgacttggtcgcagcatacatcggccatgcaccagctggctgtctggaccatgctggaagacgcaggtttgggagcttccttgcagcattacaacccgctgattgacgacgaggtgcgccgtacctggaacttgccggagagctggatgctgatagccgaaatgccttttggcacgcccactgccgaacccggcgaaaaggagttcggggagttgagcgagcggattaaaattttccgctgattgtgaggtagtctcactgtagaattgcttatctttgtacacaaacggtaagcaactatgatacgtatctttctgaccggttacatgggagccggtaaaacaactttgggaaaggcttttgcccgcgaactgaatgtacctttcattgatttggactggtacatcgaagaacgttttcacaaatccatccgtgaactgttcgtcgagcggggagaggcctcttttcgtgaattggagcggaatatgctgcacgaggtgtccgagtttgaggatgtcattatctcgaccggcggcggcacgccctgtttcttcgacaacatggactacatgaacgggcacgggcaaaccgtgttcctggatgtacatcccgatatactgttcaaccgtttgcgggtggcaacccatcagcgccccatcctgcaaggaaagacggacgaggagctgcgcgcctttattgcggacgcattggagaaacgcgcccctttctacgtgcaagcccgctaccgtttcgatgcaggacatctggaaagcagacggcagattgccgggtccgtgcagcagttgcgtaacctgctgggcgtttaatctcttgtaaatgtgtgtttttcgccctaaaaggcaagatgttccagatttatatgtatttttgtaccccttttttataaataaactactaaaacagcagagtaacaagaaatgagaaaatggcgtattgaagattcggaagagctgtacaacattacaggttggggcacttcgtactttggtatcaatgacaaaggtcatgttgtagtaacaccgcgtaaagacggcgtcggcgtcgatttgaaagacctggtcgacgaattgcaactgcgtgacgtgacggcgcccatgctggtgcgctttcccgacattcttgacaaccggattgagaagatttcctgttgtttcagacaagcggcggaagagtacggctacaaggcggagaattttattatctatcccattaaggtgaatcagatgcgtccggtggtcgaggagattatcagccacggcaagaaattcaatctcggactggaagcaggctccaaacccgaactgcatgcggtgattgccatcaatatggactccgactcgctgattatctgcaacggatacaaggatgagagctacatagagcttgctttgctggcgcagaagatgggaaaacgcatctttctcgtagtagagaaaatgaatgagctgaagctgatagccaaaatggcgaagcagttgaatgtaaagcccaatatcggcatacgtatcaagctggcttcgtcgggaagcggcaagtgggaagattcgggcggcgatgcaagcaagttcggactgtcgtccagcgaattgctcgaagcgctcgacttcatggcaagcaaaggcatgcaggactgcctgaagctgatacatttccacatcggaagccaggtaacgaaaatccgtcgcatcaaaaccgctctgcgtgaagcgtcgcagttctatgtgcagttgcacaacatgggattcaacgtggaattcgtggacatcggcggcggcctgggagtggattatgacggaacgcgctcgtccaacagcgagggcagcgtaaactattccatccaggagtatgtgaacgactccatttctactctggtggatgccagcgacaagaacggcattccccatcccaatatcattacggagagcggacgcgctttgacggcgcatcattccgtacttatattcgaggtgctggaaaccaccaatctgcccgaatgggacgacgatgaagaggtgaccgaaaacgaccacgaactcttgcgggagctttacggcatttgggatacactgaaccagaacaggatgctggaagcctggcacgatgcgcagcagatacgcgaagaggcgcttgatttgttcagccacggcatcgtggacctgcagacccgcgccaagattgagcggctgtattggtctatcatgcgcgaagtgaaccagatagccggcggactgaaacatgcgcccgatgaattccgcggtctccccaaactgctggcggataagtatttctgtaacttctcgctcttccagtccctgccggactcctgggcgatagaccagatattccccatcatgcctatccagcgtctggacgaacggccggaccggacggctaccttgcaggacattacttgcgattcggacggtaagattgccaactttatctctaccaagaacgtgtcccattacttgccggtacactccttgaagagtaaggaatcctattatgtgggggtattcctggtgggcgcctatcaggaaattctcggcgatatgcacaatctgttcggcgatacgaatgcggtgcacgtatccgtgagcgataaggggtatacgatagagcaggttatcgacggtgagacggtggcggaagtactggattacgtgcagtacagtccgaagaagctggtgcgtactttggagacctgggtgagccagtcggtaaaggaaggacgcatctccctggaagaaggcaaggaatttttgtctaattaccgttccggtttgtacggatacacatatttggaataatgagagagaaactgactgtaatcaaggtgggtggcaaaatcgtggaagaggaagccaccctctgcaagttgttggatgactttgccgccatcgaaggatataaagtcctggtgcacggcggcggacgttcggcaacgaaaatcgcagccctgttgggcattgaaagcaaaatggtgaatggacgccgcatcaccgatgccgagactttgaaggtggtgacaatggtgtatggcggactggtgaacaagaacatagtggccggtttgcaggcgcgaggcgtgaatgcgctcggcctgacgggtgcggacatggacgtgatccgttccgcaaagcgtccggtaaaggatgtggactatggtttcgtgggcgatgtgaagcaggtgaacggagcgttcctgagcgaactcatccataaaggcgttgttccggtaatggccccgctgacacacgacggcgagggacacatgctgaatacgaatgccgatacgattgccggagaaacggccaaagccttgtccagacagtttgacgtgacgctggtatattgctttgagaagaaaggcgtgctgcgcaacgagaatgacgacgacagcgtgatttcccggattaccccggaagaatttaagcagtatgttgccgaaggggttatccagggcggcatgattcccaagctggagaattctttcgaggctttgaatgccggagtcacggaagttgtaatcactttagcctcagccataaacagtgatggcggaacccgtatcaaaaaataaatcaaaaaaaagtggtggcagactgtaactttccgtttgctgaaccgtcaattaattagagatgcaggaaatcagttttcgtaatgacattctccctctgaaagacaagctctttcggttggccctgaggattacatccgaccgggcggaagcggaagatgttgtgcaggaaacgctgattagggtatggaacaagcgcgacgagtggacgcagttcggttctgtcgaagcctattgcctgacagtggcaaggaatctggcgatagaccgcagcgaaaggaaagacgcccgagcggtggaacttacccccgatatggaagaggcttccgaagcatcgggcccttacgaaaggctggtgaataaagaacgaatggctctgatacaccgcctgataaacgaacttcccgaaaagcagcggctgattatgcagctgagggatatggaaggtaagagctacaaggagattgcggttgtcctgagtctgacagaggaacaggtgaaagtgaacctcttcagggcaaggcaaaaggttaaacaacggtttattgatatagaaggttatggactttaaatatatagaacaacttttagaacgttattggcagtgtgagacttctcttgaggaagaagcgcagttgcgtactttctttacagaagaggacgttcccgaacacttgtcgcgttataaggatttgtttgtatatcagcaacttcagcaggaagagcatctgggtgcggatttcgatgcacgggtgcttgccgagattgaagctccggttgtgaaggccaggcgcatgacattgacggcgcgcttcatgccgttgtttaaagccgcagccgcagtggcagtggtgctttcattgggcaatgtgatgcaacattcgttctttgccgatgtaagagaggtggctgccgccgatactatcggcaaacaaatttccgctccgtcggtcgccctttcgggggatagggccgcaacgcacgagaagcagatattggatagtctgcaccgtgtaagcaaggagaaggaaaacagacagtagatattttcatttgcttttaaaataacattttcatttgctttaaatataatatagttagtgtgcttttattaaaacaaaaacagaggctgtgaagtttcaattctctcaaaattttatagaaactaactaagataaatgggacgccgcgtgatgcagcgtcccttttattgttgttgggggagcggaaagttgcccccctgcagtgtatgtggaatcaaagcttgtataatcccttcttggggaagtccagttccgggttacccttataaccgatgtttccgctgccgctggtacgtgctttcaggaagtcggtggcgtggcatttgatgtctcccgaaccggatacgcttgccgaaacgcgttttgcctgcagaccggatgcaaacaggtcgcccgaacccgctacacggtaatcggcttcctgggaagttcccgtcaatattgccgtgcccgatcctgagacggaggcttcggtgccggcggccgatacgttgtcaagcttcaaatctccggaaccggctatggatgccgtgagattggcgcaagtgatgttgctgccttctatgtcgcccgaccctgccacggatacgttaagattgccggtgcaggttatgttgtccgcgtcgatgtctcccgaacccgctacggatactttcaggttgtctgttttcagtccgttggctaactctacattaccggagccggcaacggagatgttgttgagtgtctcggaggagacgcgtatctccagcttgttgtaagatacgttgacacctttcttgaacttgatattcaaggtgttgttaactacattgatgtccagaaggtctacgatattgtcggaagtatacacttccacttcgggttttcccgccttttgggtgtaagtaacattcgggctgcctgctaggttcagaccggtgaagttgtctactttgatattcttggttacatagttcctgctggctttgactgtttttccgccaaacagaccggagttgcacgtgcaggctgttgcgcttaatgcgaagatgcctgatacgatgattgctgttaatgttttcatgttcaatgtattttaagtgttcttgtttgttagacgtaatcttctctcaaaaagttgcaggggattatgactttttaccgggaacttcttgctgccggttcttattcaaatcctatgccataagcataaatctttgtttattaggatataatggaggaaatgcggtgtccgcttttgaacacattgttcgtttttggtagacaagcgtttgctttttcggacgattcttcgttcttttgtccttatttcaaggaggaaagaacagatggcaacggagcatgttttagaagataaggagttgggacgtttgttggtacgggtgaatgtccgtgcccggcgtctgacctttcgtacgcgtgaggatgccattcatgtaactgttccgccgggcacaaccatcggagaagtaaagaatgctgtggagcaactgcgtccccggttgagggccgcccgacagcagcaaagccgtccgctgattgatttggactatcggattgatacggaattcttcaagttgagtttggtcggcggagaacgcgaccgcttcctttcgcgctcggaactgggggaaatgcagattatctgtccgccggatgcagacttctcaaataaggagttgcaggcttggctgcgtaaagtgattgaggaagccttgcggcgtaatgccaagattattcttccgcctcggctttatgcactctcgttgcagcataatctttcttataagagtgtgaaaataaactccagcagcgggcgttggggaagttgttccgcccgtggaaacatcaatctgtcctatttccttgttctattgcctaggcacttgattgactatgtgctgctgcacgagttggcacatacccgtgaaatgaatcatggcgagcgcttttgggcgttacttgatggcatgacggatggcaaggcgcaactgctgcgcagcgaactgagaaagtataagacagacttctgaaacaggccgattataatgggagaggcacggagcggactactgtgccaacagcttcacttcatcgccgtctttttcaaaacgatagttaccgcctttttcgctcaactcaaacagagaaagtctgtcggttgccttgtccactatcatcagtgcgctttgctcggcaaaccgttttacctcgatattgaaaggctcttcaccgatgcgccggtctgccagcacgctgtcattgagaagaatggagatggaatcgccggcaaagcctttcaccaaagtgatgttgtaggtttcggcaaagtggcgttcgccctctttctgccgttgcaggcgcatgctcatgtagacgaagataacgacaacgaatattacggcaaaagcaaggatgccgttgcctatcataaactgtttgttggtattcaggtgatgtgccatgacgattgagtttaaagaaccctgcaaatgtagtgattaattttgaatggaagataaattcgggcaggagtgctaaatattctttttttctcctattattttgtagtcgaacagattatttatatctttgcaaccgaaacggatgaaaggtggaggggcgattgagctcctcttttttgttcctaatggttaatctatgatagaaaagaaaacagtttgtcagattgtagacgagtggctggaagataaggagtacttcctggtggaagtcataatcagcccggatgacaagattgtggtggagatagaccacaaagaaggtgtttggattgaggattgtgtagaactgagccgctacatagagtcccggttgaatcgtgaggatgaggattacgaactggaagtcggttctgccggtatcggacaaccgtttaaagtgctgcaacagtacgtcaaccacatcggcaaggaagtggaagtattggcaaaagacggccgcaagcattgcggagtgttgaaagatgccgacgagcggcagtttaccgtcactgttcagaagaaagtgaaagaggagggagccaagcgtcctaaaatggtggatgaggacctgacctttacatacgaagagataaaatatactaaatacttaattagttttaaataagactatggccaagaaagaagaaactatcagcttgatagataccttttcggaatttaaagaactgaagaatattgatagaaccaccatggtgagcgtgctcgaagagtcgttccgcagtgtgattgcaaagatgttcggaaccgatgagaattacgacgtgattgtgaacccggataagggtgacttcgaaatatggcgtaatcgtgaagttgtggcggatgaggaccttgaaaacccgaacctgcagatttctttgagcgaagcccggaagattgacgcttcgtacgaggtgggagaggaagtgacggatgaggtgaactttgcgaagttcggccgccgtgctattctgaacttgcgccagacattggcttccaagattttggaactggaaaaagacagtatttacaataaatacattgataaggtgggtactattatcaatgcagaggtttaccagatttggaaaaaggaaatgttgctgctcgatgacgaaggcaatgaactgctgttgcccaagaccgaacagattccgagcgacttctaccgtaagggtgagaccgcccgcgccgtggtagcccgcgtcgacaacaagaacaacaatccgaagattatcctgagtcgtacgtcgcccgttttcctgcaacgtctgttcgagatggaagtacccgaaatcaatgacggactgattactatcaagaagattgcccgtattcccggtgagcgtgccaagattgccgttgagtcatacgatgaccgtatcgacccggtaggtgcctgcgtcggtgtgaagggcagccgtattcatggtattgtccgcgagcttcgcaacgagaatatcgatgtaatcaactatacgtcgaatatccagttgtttatacagcgcgccctcagccccgccaagatatcttccatccgtctgaacgaggaagagcacaaggcggaagtcttcctgaaaccggaagaggtgtcgctggctatcggtaaaggcggtttgaatatcaagctggccagtatgttgactgagtacaccattgacgtattccgcgaattggatgaagcggtagaggatgaagatatctacttggatgaattccgcgatgagattgacggttgggtaatcgatgccatcaaggctatcggtattgataccgccaaggctgtgttgaatgcaccgcgcgagatgttgattgaaaagactgacctggaagaggaaacggtggacgaagtattacgcattttgaaatcggagtttgaagaaggggaaaattagtgattagtgattaggggttagtgataagtgatttttggtatgtataataaaatcatcactaaacactaatcgctaacccctaatcgctaatcactaaccaccacttctttctccattattcattaaattaaagtatgacgataaggttaaataaagtaacaagagatttaaatgtaggaatcacgacggtagttgagttcttgcaaaagaagggatatgccatcgaagcaaatcccaatacgaagattaccgacgagcagtacgacttgcttgtgaaagagtttagtacagataaggatcttaaattgaaaacggagcgtttcattcaggaacgtcagagtaaggaacgcaacaaggcatcggtggctattgacggttatgacaaggaagcacaggaaaagccgaaaaccgaagaggtggtaaaggctgtggttcccgaagatgtacgtccgaagtttaagcctgtcgggaagattgatttggataaactgaatcgcaaacatactgtggaaaaagaggaagaagcggtggaaccggagatgccggtggttgaagaagtaaaggcggaagaacctgcacctgttgttgaggctccgaaaccggaacccgttcccgaacctcagcccgagccgacacctgctccggtggttgaacctgctccggcggcagaagaagaaaaaacagcgccggtggctgtagaacccgtaccggtttctaacgcggagcctgctcccgctgcaaccgaagaagctgtttcggaaaataaagaagaaaaagaagaaatattcaaaatacatcagcctgagtttgtatcgaagattaacgtcatcggacaaatagacctcgctgcgctgaatcagtctacacgtccgaagaagaaatcgaaagaggaaaagcgcaaggagcgtgaagaaaaagaaaagcagcgccaggatcagaagaagctgatgaaagaagccattatcaaggagattcgtcgtgacgataataagacgaaagatggcaacgatgccaacggcaagaaaaaacgtgtccgcattaacaaggaaaaggtggatatcaacaatgcatccaacttccagcgtggcggaaacgatcgtctgaaaggcggccagcaagggggtaataaccaacaagccggtaagaacaagaataaagaccgcttcaagaaacctgtaatcaagcaggaagtaagtgaagaggatgtggcaaaacaggtaaaggaaactttggcacgcctcacttccaaaggcaagaataagggtgcgaaataccgtaaggagaaacgtgacatggcatccagccgtatgcaggagctggaagaccaggaaatggcggaaagcaagatattgaagctgaccgagttcgtgactgccaatgagctggcgagcatgatggatatttccgttacgcaggttatcgctacttgtatgagcatcggcatgatggtttccattaaccagcgtctggatgcggaaacaatcaatctggtagcggaagaattcggtttcaagacagaatatgtaagtgcggaagtggcccaggctattgtcgaagaagaggatgccgaggaagatttagagcctcgcgctccgattgtaacggtgatgggtcacgtagaccacggtaagacttcgttgctcgactatatccgtaaggcaaatgttattgccggtgaggcgggtggtatcacgcagcatatcggtgcttaccacgtgacattggaagacgggcgcaagattacgttcctcgatactccgggtcacgaagcgtttaccgccatgcgtgcccgcggtgccaaggcaacggatattgccatcatcattgtggctgccgatgacaatgtgatgccgcagaccaaagaagccatcaaccatgccatggctgccggtgtgcctatcgtattcgctatcaataagattgacaagccgaccgctaatcccgataagattaaggaagaactggctgccatgaacttcctcgttgaggaatggggcggtaagtaccagtctcaggatatttcagccaagaaaggtatcggcgtaagcgatttgatggagaaagtattgctggaagccgaaatgctggatttgaaggcaaacccgaatcgccgtgctaccggttccatcatcgagtcctcattggataagggtcgtggctatgtggctacagtgctggtatccaacggtactttgaagatgggtgatattgtgctcgcaggtacaagttacggtaaggtgaaagccatgttcaacgaacgtaaccagcgcatgaaagaggcaggtccttcggaaccggctttgattctcggcctgaacggtgcaccggctgcaggcgatacattccatgtaatcgagactgaacaggaagcacgtgaaattgccaacaagcgcgaacagttgcagcgtgagcaaggtctgcgtacacagaagatgctgacgttggatgaagtgggccgccgtttggcattgggcgacttccacgaactgaatatcatcgtgaaaggtgacgtggacggttccgttgaagcgttgagcgactcgttgattaagctgtctaccgagcaggtacaggtaaacgttattcacaaaggcgtcggcgctatctccgaatcggatgtatctctggctgccgcttcggatgcgattattgttggattccaggttcgtccttcgggtgctgccgccaaactggcagagcaggaaggtgtggacatccgcaagtactctgtcatctacgatgccattgaagaggtgaaggctgccatggaaggtatgctggcgccgactttgaaggaacaggtgacggccactatcgaggtgcgcgaggtattcaacattaccaaagtgggtcttgtggcaggtgccatggtgaagaccggaaaggtgaaacgcagcgacaaggcccgtctgattcgcgacggtattgttatcttcacaggaaatatcaatgcattgaagcgcttcaaggacgatgtaaaggaagttggaacaaacttcgaatgcggtatcagcctgacaaactgcaacgacatcaaggtaggagacatcatcgaatcttacgaagaagtggaggtaaagcagactctgtaagcaatatataaaaaatcttcaggcgcggattacacggatttcacggattggttaagaaaaaccgtgtttgtccgtgtaatccgcgcctttttaatatagttatggctgttgtagatagtataatcttggtaataatcggtgccggagcgcttgtaggttttataaaaggttttgtaaagcagttggctaccttgttgggactggttgccggtctggtggcggcaaaggctttgtatgcttccgttgccgagaaagtgttttccaggattaccgattcaatgacagtggcgcaagtgctggcattcattgctatctgggtagcggtgcctctggcttttgcgttgatagcttcgctgctgacgaaggcgatggaagccgtgtcgctcggttggctgaaccgttggctgggttccgggctgggagcgctgaaagcacttctgctggtgagtttgctggtgggcgttatcgaatttatagattcggacaatacgctgctcagtcaaacaaaaaagaaagaatcggtgttatattatcccatgaagtcatttgccggaatattctttcctgcagcaaaggctgttacggaacagattgtgaatggagatgtggtttgattcgtaacttgtaattttataattatagaaacaatgcaacaagaagaacccaataaatatgtaaaggaactcactcaggagaagtacaagtacggttttacgaccgacgtgcacacagacatcatcgagcgtggtttgaatgaagatgtggtgcggctgatttccgagaaaaaaggagaacccgagtggttgctggagttccgcctgaaagcgtaccgccattggctgacgctggagatgcctgcatgggcgcatctccgtattcctgaaatagactatcaggctatctcatactatgccgaccctaccaagaagaaggacggacccaagagcatggacgaggtagacccggagctggtcaagacattcaataaactgggcattcctctggaagagcagatggcacttagcggtatggcggtggatgccgtaatggactctgtatccgtaaagactacctttaaggagacgcttatggagaaaggcatcatcttctgttcgttcagcgaagcagtgcgcgaacatcctgatttggtacagaagtacttgggctcggtagtgggctatcgcgacaacttctttgcggcactgaactctgcggtgttctccgacggttctttcgtctatatcccgaaaggggtacgttgtccgatggagttgtccacttacttccgtatcaatgcccgcaataccggacagtttgaaagaacgttgattgtggcggatgatgattcatacgtttcctacctggagggatgtacggcgccgatgcgtgacgaaaaccaactgcatgccgccattgtggagattgtggtgcacgaccgtgcggaagtgaagtacagcactgtccagaactggtatccgggtgatgccgaaggcaaaggcggcgtgtataatttcgtaacgaaacgcggacactgcaaaggggtaaatagcaaactgtcctggacgcaggtggaaaccggttcggccattacctggaaatatccgtcctgtattctttcgggcgataactccacggcagagttttacagcgtggcggtaaccaataattaccagcaggcagataccggtacgaagatgattcatctcggaaagaatacccgtagcactatcgtcagcaagggtatctccgccggacggagcgagaactcttaccgcggtctggtgcgcgttgcccaaaaagcggacaatgcccgcaactatagccagtgcgactccttgttgctgggcgataagtgcggtgcgcatacgtttccctacatggatatccataacgagacggccattgtagagcacgaggcaaccaccagcaagattagcgaagaccagatattctattgcaaccagcgcggcatctctacggaagatgccgtaggactgattgtgaacggttatgcaaaggaggtactcaacaagctgcctatggagtttgccgtagaggctcagaaattattagctatttcactcgagggaagcgtaggatagctattggaattcaaaattcaaaattaaatatcatgttagagataaaagacctgcacgccagcatcaatggcaaagagatattgaaaggcatcaacctcacgatccgcgacggtgaggtgcatgccctgatgggacagaacggagccggaaagagtacactgagcaatgtgctggtgggacatcctgcatacgaggtgacacgcggtacggtaactttcaacggtaaggatcttttggctatgagtcctgaagaccgtgcccatgaaggtgttttcctttcgttccagacaccggtggagataccgggagtttcgatggtgaactttatgcgtgccgctgtcaacgaacagcgtaaataccgtcatctgcccgccctgtctgccagcgaattcttgaaactgatgcgcgagaaacgcgccattgtcgaactggacaacaaacttgccaaccgtagcgtgaacgaaggcttcagcggcggtgagaagaaacgtaatgaaatcttccaaatggctatgctggaacctactttcgccattctcgacgaaacggattccgggcttgatgtagatgctttgcgcattgtagccgatggcttcaacaaactgaagactccccagaccagcgcaatggtcatcacccactaccaacgcctgctggactatctgaaaccggataccgtccatgtactgcttggcggacgcatcgtaaagacaggcggtcccgaactggctaaggagattgaagcacgcggcttcgattggattaagaaagaagcgagtgaattataaattatggattatgaattatgaattatcctgcagcatgatgatgcgcagcccgttcataattataattcaaaactcataatcagataacatgagtgtagagcaacaatatatagaccttttctcccagacggaggcgatgatatgccgccatagcgccgaagcgctgaatgctccgcgtgccgctgcatttgccgacttcgagcggcttggatttcctacccgtaagacggagaaatataaatataccgatgtcagcaagttctttgaacccgattacggactgaacctgaaccggttggagattccggttaatccctacgaagtattcaagtgcgatgtgccgaatatgagcacttccctttactttgttgtgaatgatgctttctataacaaggctttgccgaagtcgcatttgcctgagggcgttatcttcggtagcctcaaggaaatggcggaacagcgtccggagttggtgaagaagtactacggtaagctggcagatacttccaaagatggagtgacggctttcaatacagcctttgcgcaggatggcgtattgctgtatgttcccaagaacgtggcggtggagaaacctatccagttggtgaacattctgcgcggcgatgtcaactttatggtgaaccgccgtgtgcttatcattttagaagagggtgcgcaagcccgtcttctggcatgcgaccacgccatggacagtgtgaatttccttgctacgcaagtggtagaggtattcgttggggagaatgccactttcgacttctatgaactggaggagacgcataccagtacggtacgcatcagcagtttgtatgtcagacaagaagctaacagcaacgttttgctgaacggaatgactttgcataacggtactacccgcaacacaaccgaagttacgcttgccggtgaaggtgctgaactgaacctttgcgggatggctgttgcggataagaaccagcatgtggacaacaataccaccatagaccatgcagtgcccaactgtaccagcaacgaactctttaagtatgtgctcgacgaccagtctgtcggtgcttttgcaggcctggtactggtacgtccgggtgcacagcatacgagttcccagcaaacgaaccgtaatctttgcgccactcgcgaagcgcatatgtatacccagccgcaactggagatttatgccgatgatgtgaagtgcagtcatggcgctacggtaggccagctcgatgaaagcgccctgttctatatgcagcagcgcggcatctccgtgcatgaggcacgtttgctgctgatgttcgcttttgtaaacgaggtgattgacacaatccgtctggatgccttgaaagaccgtctgcacctgctggtggaaaaacgtttccgcggtgaactgaacaaatgccgcgggtgtgcaatatgtaaataatggagaattatgaatgaagaattgccatgcgggtactgatgctgcgcagcttattcttcattcataattcataatttgaaagatatggaccttcaaaagataagagctgattttccgatactttcccgtgaggtatatggtaagccattggtttactttgataacggtgcgactacgcagaaaccccgtcaggtggtggatgccattacggatgagtactattcggtcaatgccaatgtgcatcgcggtgtgcatttcctttcgcagcaggctacggagttgcacgaggcatctcgcgagacggtacggaagttcatccatgccggcagtacgaatgaaatcatctttacccgcggcacgacggaaagtatcaatctgtttgtgtccagcttcggtgaggagtttatgcaggagggggatgaggtgattctctccgtcatggaacatcacagcaacatcgttccctggcaattgctggctgccaaaagagggattgccattaaagttatcccgatgaatgacagaggcgaacttttgttggacgagtacaaacagttgttttccgaacgtacgaagattgtcagcgtagcccatgtatccaatgtgctgggtacggtgaatcccgtaaaggagatgatacgctatgcccacgggcaaggcgttcccgtgcttgtggacggagcccagtccattccgcatatgccggtggatgtgcaggatttggatgcggatttctacgttttttccggtcacaaggtgtacggtcctactggtgtgggtatgctttacggtaaagaagaatggctcgataagatgcccccctaccagggtggcggcgaaatgatacagcacgtatcgttcgaacggactactttcaatgaacttcctttcaagttcgaggcgggaacacccgattatatcggtacgacagggcttgccaaagcgttggattacgtttctgccatcggcatggagaagattgccgcccatgaacatgaactgactacatatgccatgacacgtttgaaagagattcccggtatgcgcatcttcggtgaggccgaagagaaagggagtgttatctctttcctcgtaggcgatattcaccatttcgatatgggcactttgctcgaccgtttgggcattgccgtacgtacggggcatcactgcgcacaaccgttgatgcagcgtctcggcattgaaggaacggtgcgtgcttcatttggcctgtataacacgaaagaggagatagatgtattggtagcgggcatagagcgtgtgagccgtatgttttgatgcttgccggatgaaattgcgtatttaattttttttgactattgctgcaacttttcttcctctttgtgcgtctgataagttgcagataacttaaaaataaagattatgttaataacaacgacttcagtgattgagggtgcaaagataacccgttattatggcatcgtatccggcgaaacaattatcggcgccaatgtattccgtgacttttttgccagtatccgcgatgtggtaggcggacgcagcggttcgtacgaggaagtgcttcgtgaagctaaagatacggcgcttcgcgagatgcaggaacaagcccgtttgttgggcgctaatgcagtgattggcgttgaccttgattacgaaacggtaggcggcagcggcagtatgctgatggtgactgcttgcggtacggctgtgacggtagaataaagagagtgcggcaaaataaaaaacgcttgcggtttatttctttcaagcacggaattatacaggatttcacggattgactttattcttttccgtgaaatcctgtgtaattccgtgcctaaaggaaatcatcaagtacgttctgatatattcttttgtttttccagtctttggcataaattcggttaatcgtttgcttatttcatttcaaatcaatacttttaagctttcgttcaaccttttaatacgatttatgctatggaccaattgcttttctggctggtaccggccgcttccgttctggcgctttgctttgcctggtatttccatcgtcagatgatgaaagagagtgagggaactcctcaaatggttaagattgccgctgctgtgcgcaaaggcgccatgtcctatctccgtcagcaatataagattgtgggatgggtgtttctgggactggtgattctcttctcgattatggcttacggcttcggagtgcagaactcctgggttccgatagctttcctcacaggcggattcttctccggcctttccggatttctcggtatgaagacggccacgtatgcctcggcgcgtacggcaaacgccgcccgtaactcattgaatgcgggtttgcgcatcgctttccgcagcggtgcggtaatggggctggttgtagtggggcttggcctgctcgatatttccttctggtatctgctgctcaatgcggttatccctgtggatgtgatgacacccactcataaactttgcattatcaccactacgatgctgacgttcggtatgggagcttccacacaggcgttgtttgcacgcgtgggcggcggtatctatacgaaagctgccgatgtaggcgccgaccttgtgggcaaagtggaagccggcatccctgaagacgatccccgcaatcccgcaaccattgccgacaatgtaggcgataacgtgggcgacgttgccggtatgggggccgacctttacgagagttattgcggctccatccttgctacggcggctcttggcgcagccgcttttatccattcgggggatacgctgatgcagttcaaagccgtcattgccccgatgctgattgccgctgtggggattatcctttctattataggcatcttctccgtgcgtaccaaagagaatgccgggatgaaggacctgctgaactcccttgctttcggtacgaacctgagttcggtgctgatagtcattgccactttccttatcctttggctgttgaagctggacaactggttgtggatatcttgctcggtggttgtggggctggtggtaggcatcgttatcggtcgttccacggaatactatacttcccaatcctaccgtcctacccggaaactgagtgagagcggcaagacggggccggctactgtcattatctcgggtatcggtctgggtatgctctctactgccattccagtaattgccgtagtggtgggcatcattgcttcctatctttttgcttccggtttcgactttgccaatgtaggtctgggactttacggcatcggtatcgctgccgtaggcatgctttccacgttgggcattacgctggccacggacgcttacggtcctatcgccgacaatgccggcggcaatgcggaaatgtccggtctgggtggggaggtgcgtaagcgtaccgatgcgctcgattctttgggcaatacgacagccgctacgggtaagggctttgccatcggttcggctgcattgacgggacttgccctgcttgcatcctacatcgaggaaatccgtatcggactgacccgtttgggcactaccgacatctttgtgggcggtgaaacggtgtccgtacaagatgccactttcttcgatttcatgcaccactacgatgtaacgttgatgaatcccaaagttctttcgggcatgttcctcggttcgatgatggctttcctgttctgcggactgacgatgaatgccgtaggtcgtgccgctgcccatatggtggatgaagtacgccgccagttccgcgagataaagggtatccttacaggtgaggccgaacccgattatgaacgttgtgtagccatctccacgaaaggcgcacaacgcgaaatggtagttccctcgctgatagcaatcattgctcccatcctgaccggacttgtcttcggtgttcccggtgtgttgggactgcttatcggtggacttagcagcggattcgtacttgctatctttatggcgaatgccggcggtgcgtgggacaatgccaagaagtatgtcgaggaaggcaatttcggcggcaaaggcagcgaagtgcataaagccacggttgtaggcgatacggtaggcgacccgtttaaggatacttccggtccgagccttaatattcttatcaaactgatgagcatggtggccattgttatggcggggctgactgtggcttggagcctgttctaaacatacgcgcttcgttccgtaagacaaaatcattcatcccgtgagacggatttattcatctcacgggatgatttttgtcgttttacgggacgaatatatttgtctcatgggatggatttatcacgataatatcctaatttctacgttcgaagcagcgctttgtctgtaatcacctatatcgaacagaacaaggttaccagaaacggcacgctgaaatccacaacaaatccgtgaaatatggagactacgacaaactgctgtcctgcggtacgggtgattatcgggagtgtggtatccatcgttgtggcaccgccggcagagatgggagccaggttgccaaaccagcgtaccagtaatggtgctgccagcagggtaagtatctcgcggctgatattggcgagtagggcgatagttccgagttcggctcctttgtattcggtaatgaagatgctggagagtgaataatatccgaatcccgaacctacggccaggcaatcggtcagggaacggtgcgtcaggatgaggctgaccgctgcagagcctgccagcgtgcccagtatcgtcataatgggcagaaataccagtcggggattgagcgaacggaaattcttcaatgtctgcgggtcgttacctacactcaatcctacactgaacatcagggcgcaaagtgcatagaagctgaccttgctatccatgactgcatcaacgggtatcaggtggaaaattccgcaaagcgtacccaaaacaaagaaaccgattatgataaggctgcctttcatgccgtttttcctttcttcctatataaagctttccacagcgcccaggcagcaatgacactgcccaacgtactgcccaaggtcagtatcacggcttcgatgcctatggtgtgcaatcctttgatgatttgctcgttgccgccaacttcaatgccgaggatgaacagcagcgcccagattaataccgtgatgacagtatgaatcttatgtaaacttcttttccgtaagagatagcccagcaacattccggtgagcatcagtccgataatcgtaaacatctctgttgtattttaatttgctggcaaagatagtcatatttattctctttaaaaatccggtttacttatgaaaaggtttatctttgcgcattctaatgtagtgatgtatgctgttaccttatttaaataaagaactgatagaagcgggatgtgacgaagcggggcgcggctgccttgccggtgctgtctatgccgcagccgttattcttcccaaagatttcaagaacgaactgctgaacgattccaagcaactgaccgaaaaacagcggtatgccctgcgcgaagtcattgagaaagaagcgttggcatgggcggtggggattgtttctcccggggaaatagataagataaatatcctcaatgcttcttttcttgccatgcaccgtgctgttgaccggttgcagctacgtccgcaacatttgcttatcgacggcaaccgtttcaagaaataccgggacattccgcataccaccgttgtgaaaggcgacggcaaatacctttccattgcagctgcttccattcttgccaagacctatcgcgacgattatatgaaccggctgcacgaagagttcccttattacgactggaatcataataagggatatcccacaaagaagcaccgtgcggctattgccgaacgaggaaccactccttatcaccgtatgacgttcaatttgctgggtggcgggcagttggagcttcctttcctataatctttgttccaataagtctatccgtttggatagcaggtcgatgattctggtgttggccttgatgagttcacggaggtcattcaggtcatatgcgctgtcattgttgctgttgtttttgcaactgttgtctgtatccggattcatacttttgtctatgtggctgaatagacttaacgcagagatacccagtacctttgcaattttgtctaatcttgtcagtgttaaatccgtttcaccatattcaattttacagtaggcacttgtagaaagatttagtttttcgctcatttgttcttgtgtcaggttcttctccaagcgtagcagctgcagttgttgtcctgcgattttctttagttttgtgttcattctgatagtattttggttaatagtaggtgtttattgggtaaatataataaaattagtgtacatacgcaatattaaaatgcgcttatctttgttaacgaaaaaaaaagttatctgatacggattgataagatgtgatatcatgattaagcagattggaaactgactgtgaagcgtattttcagatttagtaaaaagctgttcacaactatcaatattttttaggcgaaaagggagatttacacatttattataaaccctggagcagaagtgctatttctgtttcacattaaaaattacaggttatgaagaaatatttattggttttattgggtctgtttgttttgactaccactacttactctcaggaattaacggagaaagagaaagcaagacaagaaaaagaagcacgaaaacaagcaaaagagaatgccaagaaagaagctaaattgaagaaagcagccaagaaggatgctaaaatagctgatttgcgtgcagattatgaagaatttttggcagagtgggagcctatcgaagccaatataggcattgcggaagttgatacattttttatacacacgaatgaattgtttgctttgctgcaacgggtagaagagaataccgcttttatagagatggttcccgaaccttattttgacgaagaaatgggagtgacggatacgatttggaatgctaaaaacaagaatacaaacgaacccattgccaagaatgatgcgctgaaagtatatagtatcgctactctgaatcttacagaggctgctgcccgcggagtctcccttactgctgaaagtgtatcggcactggcatctctgacttcggacccattgaaagcattgacaatcggaaagaaagtgaaacaggcaacaaaagctattaagatgtctgtaaatgtaattccattgattcagcgtaatatcaaagagaacacggagaaactgaagtataagaaagccaacgaggggcaggaagtgaaagaagaatagttgtaaacaagggacagcacgatgaaaaagatatatttattgtttgtaatgcttactcttgctttgggtgtttttgcccaaagtaagggtaagaacgcaatgaccttacgtcttgtagatataaaggttacggacggcactttggtgaatattgccaaagagcaggaggccaaaggtaataccaaacctatggatatgattcgtatctatgaggggaatgtacgtgccaagctggatgaagtggcaaaggcaagcgggcgttttgaaatatccgatgaaaacgtattggaagccctcacacgggatgcagaggccagtctgtttatgaagatgtccagagcggaaaagatagagtacgtatcttccaagcagaatgactatacgctttcctgtgatataaacagttgccagttcacccgcagggcaggtggagcaggttattcctgtgtacttcgcctgaaagtaagcatcagtgatgcgcgcgattctacggcggcagcattgatttcgcgtgagtttatcagcgatatcaagaaaaccgctatccgtcccaaccgggacgctgcttgtcaggaagctctggctactttaacggagcctttgacggacttctttttaaataatatcccggtatacgggcttctcggctacgaaggagatgaatatgtcattacctgcggcgagagcctgaatataagaaaaggagatcagttccaggtttctttgataaaatatagtggtggggagcgtcagagcgaagtggttggtgctgtaaaggtacaagacttgcgcgcttctacatctgcggtttctttcaccgagggtaaagaccgtataatagaattgatacctacattggatgccaacagtttcctgcaatgtagactgttacttttaaaatcccgttgatatatgaagaagatattgattttttcttttttctgtttactgtgcttcacgatttcttttgcccaaaaggtaaaaccggtgaattatggtggatcggttaatttaatggaagtaaggggacgtggaggagatgccgtcgtggtactccgtacgttgggatatggcaagaatgatgctttggcgcaggaagatgcggaagtgcgtgtaatccgtgctttgctttattcgggtttttccaaggattatccggctgtgatttcgatgacggagtcggaggcggaagcgaagagccagggcaagttgcttgctttttttgagaacaaggagtataaggattgtataagttcggtgaagcccatgggaaaactggacaaagtgaaaggtgagaaagtaaagaagaagccttttgatattgcagtcaactattatgttttgaagaataagatagcgaatatgaacttcgattcgttcggtttttgattaatatagatgattatgagaatagttgtttcttttttaagtctgttcctacctctttatctgttagcccaaaatggtcaggcgagacagccgaatgtaatggtggttccgtttgtagaacccggagaaggagagaacgaccggataaaagatgcggttctgaatgatgaagctgtgccgttggctctttccaagataaaggaagagtttaatttgcgtaatttcaagacgattgactttatgacggagttccagcgggtgcagaaccgtgcttatgcggcctctgcattgaatgccaaatctaccggattgcaggcgtatgtggatggcgcacgggcggatatatatgtgacggtgaaaatttccaaagaagatttcgccggaggagcttccaatgtcactcttttgatggaggctaaagagcgtgagaccggtttttcgttggcaaacgccagtattgtgagcgaccgtttccgtgcgtctaaaaaagagctgaccgaatatgccttggaaggcatctctgagaatttcttcaaccagttgaaacaggcattccgtgatatggtaaccaatggccgggaagtgaacataaccctcaatgtcgatgaaaactgcgactttgatatggaaaacgatgctgtcggcacaagagatatgacgttgagtgatgaacttgacgagtgggtgcttgaaaatgctttcaaaggcaacggtgaagtccgttcgggaggcaacggtctgaatgtctatatgcgtgtgccggtatatgaccctgatacgggaagaccgcgttccataaagtcggaaacgggcaagctgagaaggtttgcatcgggattgttgaaagacaaaggctatacggttagcgagaaagccgcttccggacagtacatacagcttttaattcagaattccagggaataacattggactgggtgtccggcaggtgttttatggataagatacacagccggacatctgtcttttaataattatgatatgaagaaattcttatttctattgattgcaggattttgtaccgttcagctttcgggacagacaatcaacttctccgtacaaccgttgtccggggaaagcgagttgtccgcagcatcgcaagaaatgcttcaaaacaagttgagacaaattatcacccgaaacagtgcgggagcggcaaacgactataatgtctttgtcatagaaccggtgataacggttttagacaagcagtctacttcgggattgatgcgtaataccacgcttgtaaagggagaattgacgctggttgccaagaacaagatagacggcagcatgtatcacagtgccgttgtgtccgtgtccgggcaggctgcagaaggcgctgacccctataaggccatgatttccgctctgcgtacaaccgatccggtttacacccgttttatccgtattgcccggcagaagatacaggattattatgccgctaattgtgctactattcttcagaaagcacaaagcctttacaatttgaagaaatacccggaggcattgagttatctttctgccgtgtcggagagtgtgccttgttatgagcaggcttccgtgctccagacggagttggcgcagtatgtgcccgatgtacagccggatacggtgattatacagaaagtgatagagaaacctgttgaagtggagaaaatagtggaggttgaaaagatagtggaaaagccggttgtggttgagaaggtagtcgagaaacctgtgattgttgagaaagtggtcgaaaagcccgttgcgcaggaaactccggcagcccgctgcgaaattaccctttccacaaacaggttgcagttcaaggttttgaagtgcacaggtaatgctacccagcagcgtatcacgattttggcggaaatgaccaatgtggacacaggtcgtaatacggatgagttcttgcgatttacttccgcctttacggacagtggtacggaatgcaagaacttcgagatacagaatggggcatggatgaagatgccgccccgtgtaacggtacggcgggagttttatgtaacgaatgtattcgacagattctcccttttttcttatatagagttgttggtagcggatacaaaagtatacattcgtaacctgccggttcaatggcaataaaaagataaaaagcgtatgaaacgattgatatggatgattttcatcacattgctgactgcgggtgtcgcagcccagaccaaagtggtggaaaggagtgcaaagaaagttccgggctggctgaatacggcagtggaagattatctggtagtgtcggttacggccggttcgttggctgaggggcagacgaaagcgttgaccgagataaccgaacgtatcattcagtcggtagccagcaatgtaacggtgtccaagaagaatactctttcggaagtcaatgtgaatggaaacatagaatcttcggatgcttttacgcaaatatccaggataaagtctgccaatcttccttttctgaaagggatttccctttccaatgtcgaagaaatctattgggagaaagtccaggacaaagccacgaaaaaagaacattataattattcggtaaagtatcctttttcgcgtttggagcaaaggaaactgactgcggaatttgaagcgttggatgccgggcaggtggcccggtatgaagcattggagcagaagataggggcaatcgaatctgccgatgagataagccgtgccataacggaactgaatactttgtccgagtacttcttcgatgatgtacgtttgagccgggtaaaggggttgactgcccgctacaggcagttgtacgatgcgcttacactgacgggcactttccttgaaagcggaaagtatcagtgtctgcttctgttggatggtaatcctataaaagtggcggccaaacccaaagttacgtccaattgcgccggtcaaatcagcgtccgtcctgccgacgggatgttcgtcattacgtacagtgcggaagactgtctgccggaagaagagaacttcctgaacatctcactgacagtcggcggcaagcgtttgcagcataaagctttcctgaacgaggcaggaacgggaagcatggctttctccgtcgtaccggaagggaaactggtgctgacagccgattccgtggcggacagaaagatattcaatatcaatatccgtctgacattgaacaacaggggaggcactcctttcgggttgaaggcgttggaacttcatgttcctgaaatatccgctcctattatattcgatgatatagatggcgtttataaaaccaaaggcatcatacagataaaggcattggcagagggtgaatttacagtcggagagaaaaagaagtcgcttttctcctttgtgcagggtgccataacattcgtcaatccgcaaacgggtgccgtagagcgctcccagttgtctttaccttatgtcacaaactgggaatgagtatattattaacaataaaaaagaaatgattatgaaaagaagttttgcgttttttgcgcttgtctgcgctatattgttcggttgtgcggcaactgccggtgcacagtccaaagctctgaaaaaggatgtcaagaaaagggtgaaagagttgaccaaagagggatggaagccattggcaagttcttctacactggagtatgctttttccaagtaccgcacgtatctggaggaagatccggaaaaccgcatcgagctggtaggtattgccatcggtaagaatgtgaaaataggcagagagaatgccataatgaacggcattaccagttatgcttccagagccaaagcacaggttgtaggcaagatgaaagggttgatgtcttccgaggcgtcttctactccggaagaggagattgacaagttcggcgcggcttatgaatcgggtgtcaatacaaagattgccggtcttgtgaagcagcaccttgtattggtgaaagaaaacaaggacggcagcaaggaattcaatgtatatatgtttatcgatgaggccaaagcaaagaaagccagggaagaggctgcgttggcggctaaaaaacaggcggctttgggcgtactctcccagcaagtggaggagtttatcggcgaaccggtagaggctgagtaatctatatggatttataaaggttgttcctgtggcacagtgctccgggtgcaacctttttcggttatttaaaacgatgcgaccatgaagaaaacaatatcttttattgcagggcttttattggctcttacgggcatggctcaggagaacaagggcggcatatccggttttatgaaagaggagctggaagacttcgataaatttatggatgatgccgataaagacttcatcaacttcatgcgtgagccttggaaggagtttgaagcagagaagccggttttgaagcgggtgaagcccgaaccggtgaagccggttgtatacgatgaaaagactgcgccgaagagtgaaaagccggtttgcctgacgattgaggaaatactcgatatgacaacttcggaagggaaacagaagccagtagtacagcttaatgaggtggacagaattgtctttgacaaacctgaagtgatagttcggaagaagaaagacccgaaagtcatcattatcgaagagaaagctgcggacaagccgacggcgcagccggaaaagaaaccggtggtcgaggttgtcgagaccgaaccggaagcagaacctgctcctgttgttgaagcagaccgacgtccggagccggcggcagaaccccggttaccggtctcctcaactccaatgtccccattgtacaggggcgaatcgggacgcagcaagatagcgtatggcggtctggctttttatttgaataacagcctgaaccgtaaatgcagcctgaacggacttaatgagaatgccattgcagatgcctacgaggctttatgcaactccgattacaagccgttattggcagattgtgcgcagatacggaaagatttgcggctgaacgattggggagtttttacattggtgaggcaggtagccgatacttattgcggtacggccaatgaaagcattgtaatgcaacagttcctgctcaatgaaatgggttacaaggcacgcatggcaagaaaagccacggaagataaaatgatgttgttcgttgctacggattgttctatctatgcgcatccttatataaccttaaacggtcagaactactataatctcagcggcaataatgaacaatgccagttttacatgtgtcagaaagactctcccaaggcaaagaacagtgtaggaatgcaattgaaagaggctccgttgtttccgggtacagtcgtcagttccactcaccaggcaaagggaagcgctgccagggtaacggtggatgttccgaaggctttgatggatttctataaagattatccccagtgcgattacagcgtctacttcaatgctccggtcaatgctgccatggaaaaccggatattatcttcattggctcctttggtgcaggggcggaatgaggcggatgcggcaaacattctgataaatttcgtgcagaccgctttccaatatcagacagacggccaacagttcggatacgagaagccgttctttgtcgaagaactgttctactatccctattccgattgcgaggaccgtgcgatgctgttctcttatctggtgcggaaactcttggggcttgatgtcgtattgctggattacccggaacacatcgccactgctgtccgcttcaatggcaatgtttccggtgattatctcatggtgaacggccggaaatatatagtttgcgaccccacctatatcggtgcttctatcggtatgacgatgcccaggtataaaacggtgtctgcaaaggtgttgaaatactgatgtctgtagcgtacacgtattttcagaaccatttgatctttctgaaccatataaaggtcacggccgataatattgcggacagcagcacaatgaacacaaacgcatgtggaaatccttccaggtgtatatccacgttcataccgtagaaactggctatcaacgtaggtatcatcagggtaatggagaggcttgtcatgcgtttcatgatagcattcacgttgttggaaataatggaagcgaaagcgtccattgttcctgtaaggatgtcgctgtagatgtttaccgtgttgtacgcctgtttcagttcgataacaacatcctccagcagttccaaatcaagatagtccgtgtcttggaagatgtttttcaaccgtcctatcatgacttcgttgccgcggatggaagtgttgaagtacaccagcgtcttttgcagtttcatcagctgtagaaggtcttcgttgcggatactcttttccagttccttttcggcggtggccacatcgttattgatttgtttcagatatttcaggaaccatacggcggaggagtatatgattcgtaaaatcagtgtcagcttattgttgacaacaatccctttgcggcgggtatgctgtatgaagtccggtatcagttcggtgtgatgataacatacggaaacgatgatatcgttgtttgtaatgatgccgatgggcacagtgataaacgggatgccgtgctgattgctctgcatcggaatgcgcagaatggtcagcagccagttgccttcggtctccgtgcgcggacgttcgtccgtatcggctatgtcttcaaggaatgattcgggaactttcagttcttgggtaaggaattggaaatcgttgtcgtccgggcactccacgtttacccagcagttaggtttccattcggctttttctacgaagccgttttcgctgtagagatactttctcattgttttgcctcctttctttagtccgaacagaggcattgcgaccaacgtctccgctcgctttaattgtaaacactattgcacgttcgtgggtttgaatcgtccataatttcagttgattttatttaaaagccatgcaaaagtatgaaaatcatattggatttcatgcgttggcatggcttttttaggatttcttgttgtttatggaaagcgctcctttgtgcaaatgttatttttactttccgaatgacatagtttggccgctattttgtacctttgcaattggaaaaacggattgtaaatcaattcccttcttccatataagtagagattgtacaattaaaaaactaataattatgagcaagaaagcccttttaatgattcttgatggctggggtatcggcgatcaaggtaaagatgatgtgattttcaatacgcctactccctattgggacagtctgttggccacttatccgcactcggagttgcaggcaagcggcgagaatgtcggtttgcccgacggacagatgggtaactcggaagtaggtcacctcaatatcggtgcaggacgcatcgtataccaggacttggtaaagattaaccgtgcttgtgccgacggcagcatcctgaagaacaaggaaatcgtttccgctttctcttacgcgaaggaacacggtaagaacatccattttatgggactcaccagcaatggcggtgtacacagttctttcgaccatctgttcaagctttgcgatatttcaaaggaatacggcatcgagaatacatttatccactgctttatggacggtcgcgacaccgacccgaagagcggtaaaggtttcatcgagcagttgacggcacattgcgaaaagtcagccggtaagattgcttccatcgtaggccgtttctatgctatggaccgcgacaaacgttgggaacgtgtgaaagtggcttatgacctgttggtaaacggagaaggtaaggttgcttccgacatggtccaggccatgcaggagtcttacgatgagggcgtaaccgatgagttcatcaaaccgattgtaaacgcgaacttcgacggtactatcaaggaaggtgacgtagttatcttcttcaactatcgtaacgaccgtgccaaggaactgactatcgtgcttactcagcaggatatgcccgagcagggaatgcacactattcccggtttgcagtattattgcatgactccgtacgatgcttccttcaagggtgtgcacattctcttcgataaggaaaacgtacagaataccttgggcgaatacctggcagccaacggcaagacccagctccatattgccgaaacggagaagtacgcccacgtgacattcttcttcaacggcggtcgcgaaactccgtacgatgcggaagaacgtatccttgttccgtctccgaaggtggctacgtatgacctgaaaccggaaatgagcgcttacgaagtaaaagataaactggttgaggccatcaataccaagaagttcgatttcatcgtagtgaattatgcgaacggcgatatggtgggtcacaccggtatttacgaagccattgagaaagccgtaaaagctatcgacgaatgcgtgaaagatacggtggaagctgccaaagccaacgattacgaggtaatcatcattgccgaccacggtaatgccgaccatgccctgaacgaggatggtacgccgaatacggcccactctttgaatcccgttccgtttgtttatgtcacggccaataagaatgctaaggtagagaacggtgtattggcggatgtagctccttccatcctgcatattctgggtatgaagcaacctgctgaaatgactggtaaagacttgattataagttgataattgagaattaaaaattaagaaatgatagcaagggataatgttatccatgctaagtcgtatgcgtttgctattcgaatagtaaacgcatacaagtttttagcggattctcagaaagaattcatattgtcttagaagaagcggatgaaacaatctttaaacaggtgaacatttattttttaatgctcaatttttaattttcaatttactaatgttacagatagatgatgttgtagtttcttttgatgtactgcgcgagaagttcctttgcaatctggatgcttgcaaaggagaatgttgcattgaaggggatgccggtgctccggtggaatttgaggaggtagagaaactggaagaggtactgcctgtgatttgggatgaactttctccggaagcgcgtgccgtgatagatgcacaaggagtggtgtacacggatgaagagggcgatttggtaacgtctatcgttaataacaaggactgtgtatttacttgctatgacgggaaaggctgttgctattgtgccatagaaaaagcgtatagagaaggtaagacggacttttacaaacccgtttcctgccatctttatcctatccgcataggcgattacgggccttataaggcggtgaactatcaccgttgggatgtttgtaaggcggctgtcctgttggggcggaaagaggatgtgccggtatataagttcttaaaggaacctttgatacgtaaattcggcgaagattggtatgccgagctggaactggctgccgaagagatgaagaagcagggaatgatataagaaaagctccggtcaacaggtatttcctgtccgtccggagcttcttcgttgtaagatgtgaggttggtaaataaaaaattgaggattgagaattaagaattaaaatgatagcatgtctatttttcaattcttaattctcaatttttaatttcctgattatgcgtcaatatttgcataggttgcgttcttttcgatgaaatcgcggcgcgggcctacgtcttcacccatcagcatggagaaggtatagtcagcttcggcagcattctcaagatgcacttgcttcagcatgcggttttccggattcatggttgtctcccacaattgttccggattcatttcacccaaacctttgtagcgctgggtgtggactgcattttccgaaccgccgccgtaagtatcgataaacttctggcgctgttggtctgtccagcagtattctttcaccttgcctttggtgcagagatagagcgggggagtggcaatgtacagatacccttgctgtatcacctgcgggaaatagcggaagaagagcgtcatgatcagcgtgtcgatgtgagaaccatcgacgtcggcatcggtcatgatgattactttcttgtaacgcaacttgtctatattggcttccttgctgtcctctccgtctacaccgaagcggatgcccaaagcctgaatgatattgtttacttcatcgctttcgaatgctttgtgccacatggccttctctacattcagaatcttaccgcgaagcggcaggatagcttggaaagtacggttacgtccttgtttggcagaaccgcctgcagagtcaccctcgacaaggaacaattcgcattcttccgggtctttgctggagcagtcggccagtttgcccggcatgccgccaccggacatcggtgacttgcgttgtacggactcgcgcgccttgcgtgcagccacgcgtgcctgtgctgccaatatcaccttgtctacaatcattttggcctctttgggatgctcttccaggtaataggagagtgcttcgcctacagcctggtccacagctcccataacctcgttgttaccgagctttgtcttggtctgtccttcaaactgcggttcggccaccttgatggagataactgcggtcagaccttcgcggaagtcatcgccggaaatctctacttttgccttttccagcatcttgttgtcttcggcatatttcttcaaggtgcgggtcagcgcacggcggaagccggccaggtgcgtaccgccttcgatggtattgatattgtttacataagagtggatattctcgttgtaggaagtattgtacatgatggctacttctaccggagtaccttgcttttcggtgttgatgtagatgacatcgttcaccagatgttcgcgggaagaatctatatagcgtacaaactccttcaagccctctacggaatagaaaacttcttgcttgcagcttccgtcttcttcttttacgcggaggtcggtcagcgtaattttaatgccggcgttcagataggccagttcgcgcatgcgggttgccagaatatcgtaactgtagaccgtttcagtaaagattgtagcatccggccagaactgttggcgcgtaccggtgattgcggtagtgccgacttcctttaccgaatatagcggatggccgcattcgtattcttgctggtagatttttccgttgcggaaaacctgtgtcgtcatgtgcgtggacaatgcgtttacacaagatacaccgacgccgtgcaaaccaccggaaactttgtaggaacccttgtcgaatttaccaccggcatgcagcacggtcatgacaacttcgagagcggatttctgttctttttcgtgaaagtctaccggaataccgcgtccgttgtcttgtacggtgatagagttatcttcgttgatggtaacttcgatgtggtcgcaataaccggcgagcgcttcgtcgatggagttgtctacaacctcgtaaaccaagtgatggagtcccttggaactaatgtcgccgatgtacatggcaggacgcttacgtacagcctctaaaccttccagtacctggatgttactggccgagtaattgctttcgccgtttatcttttcttcttcagtcataatctaatttctcttattgtaataacaaagcaaaaatagtgaaaatccttgatatatcatgccggcggcttgataaatttgggctgtttacagctttttagcaccgtgaggatttgtttgttttgagggtattgtccggaaatgatacaaacgcagaaaagtccgaactaaaaagtccggactcccatatcttttgtgtaacttatcagcttaaccgagtttgttgatataaactgccaactttgacttcaggttgttagccttgttcttgtggattacgttagtcttagccaacttatccaacatctttgtgataccaggatacattgctgttgcttcagctttgtctgtagtagcacgaagcttacgaacagcatttctcatggttttgccataatatctgttgtgaagtcttcttgtctcttcttgtctgattcttttcagtgatgatttgtgatttgccatctcgactaatcttttttaattcgtttatctttttaattgtagcccgtgggggaatcgaacccccctttcaagaatgaaaatcttgcgtcctaaccgatagacgaacgggccatccttgttgagcgtttccgctctttgcgaccgtttttcctttcgtttgcggttgcaaaggtagaaactatttttgaattggcaaacatttctgataaaaattttgcagaaattcttctgcgttttctcttgtatgtggttttatttattgataatcaggtatataatgatgttttaaattttctgtatttgcttcattttttttattcctcttctttaagttccgtagtttcgcgctttttttgtagctttgttagccggattgaaacttgattaaaggacggaaatgttacagaaaacgcaaggaatcgtattgcattctttgaagtataaggatacttctattattgtagacatctataccgaggtgtccggacgggcttctttcctggttccggtgtcccgttcgcgcaaggctgcggtgaagtcggtactgttccaacctctgtctttggtggagctggaagcggatttccgtccgaatactgctatatataaggtgaaagaggcaaagtctttctatccttttacttcgattccttacgatccttataaatctgccatcgctttgtttctgtccgaattcttatatcgtgcgctgcgcgaggaggcggaaaaccgtcctttattcgcttatttgcagcattccattgtctggttggatgaatgcggcagtggctttgccaattttcatctggtctttttgatgcgtttgtcgcgttttctcggattgtatccgaacttggaagattatcacggcggcgattattttgatttgcagaatgcctgctttaccccgttgcgtccgcaattgcattccgactatatagcgccggaagaggcggcacgtctcacaaggctgatgcgtatgaactacgaaacgatgcatctctttgccatgagccgcatggagcgtgcccgttgtctgacgattatgaacgagtattaccgtttgcatctgccggattttcccgtattaaagtctttggaagtcttgaaagaattgtttgattgagttccgtttcaaagggcattccgtttccttacgtgtttcctggagtttcctgtagagaaacgcgcgtttcccttaagggaaatttcagtttccttaaagggaaattctcgtttctatgaaagggaacgggcgtttcttccgggggaaacgggcgtgtcataggcatggaaacaataaaagccgtacttcaaactgctctccaaccggaggggagcttgaagtacggctctgtacgtattgggttgggcagaacgcttatcccagcaattcctttactttggccgagatggcacgtccttcggcaagcccggcaagtttcttgctggctacgcccattaccttgcccatatccttaccgctggtagcgcctgtttcggcgatgatttccttcaaggcagcttccagttcttcgggagacatctgcttgggcaggtatgcttccataacctttacttgcgccagttctgcatcggcaaggtcctgacggccttgctgcacgtagatttcggcggcgtccttgccttgctttgtcagcttctgaatgattttcagggcatcggcatcggtcagggtatcattggctcccggagcggtcttggcttcgaggaatactttcttgatgtttctcagggtttccaaagctactttgtctttggctctcattgcgtttttaatgtcttcgctgactctttcaaataaatccatattgttctttattgttttactgtttacaatgtactgtttccggctgaagtccggaacggcagtcggtttagaaagtgattatgccgttgccgccgctttccgcttcctgcgcttcttcggtggcgagtatgccggcttcttccgccttgaccttgattgccgccagggtactcttgtcgcgctggtaggtaggggagttttccaccatgctgatgatgtcggcgttgtccaggtcttcggggttgaagatatagatatgccggcggcgcagacgctgatacttggtgttggcatcctttccgtagtaggtttcgcggcgtgagcgtctttgctcttcctcttcctccagttcggcaaggcgcttctgctcttctgcggtacgctgggtgatgcggtcgtccatctctttcatatggatgtcctggatgccgaagccggtggcaagcagggtaatcttgaccttttgctccagtttgtcgtctacggccataccgaacttggtttcaaagtcgcggctgaagcggttcatgaactctttcacttcgtccatttcgctcatcatcaatttgtattgcgagctgtacgaaatgttgagcagcactttcttggagttgaagatatcgttgttgttgagcaacggagagtgctgggcattctggatggccatgctcacgcggttgtctccctcgccgtagccggtactcatgatggccacgccgccgtctttcagtacggttttcacatcgttgaagtcgaggttgacctttccgtgcagggtaatgatttcggcaatgctcttggcggctaccgagagggtgtcgtcggctttgtcgaaagcatcgtctacggagagttcgctatatatttcgctcagtttttcgttgttgataaccagcagggcatctacatgcttgctgatttcctccacgccgtccagtgcttggtctatcttcttgtcgccctcccagcggaacgggatagtgacgatgccgatagtcaggatgtccatttctttggcggtctgtgcaatgataggcgctgcacctgtacctgtgccaccgcccattccggcagtgatgaataccattttagtaccgtcgttcagcatggccttgatgtcttcgatgctctcttcggctgccttgcgggcacgggcaggacggtttccggctcccagaccctctttgccaagttgcagcttcacaggaacgggggagtctttcaacgcctggttgtctgtgttgcacagcacgaacgttacatcatgtatgccttcccggtacatgtggtttacggcattgccgccaccgccacccacaccgataactttgatgattttcggtgaatcggtcggaaaatcgaattgtgctatatcatccatgattatagagtttttaattatttcatatcatcgtccgagaatatctcattggagattttgttgaaggtcttttcaaaccagctgggacctttctttttcttctccttttctttcttctcccgctctttgcgttctttctccctgcgctccttttcctctttctcgcgttgcgctttggcggcacgggctgcggcttcctgttctttcagggcttcgtcgttaccgaacatgtcagcgggggtggacgcagggttgccggctggttgtgccggtttcacctcctgcaggcagcagttttcgttgcctgcggcaagaaggccgagcaaggtattctgcataccatccttggccagtacgtcactgaatccgtgaacggtgtcatgcacgaagcgcatcgtctttactttctctattttgctttgtttgcggaaagcttcctcgatattcttcaggtttgctccgcctccggtgaatacgactccggagaacagcttatcctcataaccggagagctgcaactggttccatacgttggcaaggatttcttcggagcgtgctccgatgatgttgttcagcgtggccagctcaatggcgcgtccgtcttccagtgcacatacggcgggtgtctcgctctcttcctcttcttcgtagagggcgttgccgtattgcagtttcagcttttcggcatcctgctcttccatctgcagggacgtgatgtcacgggtaatggtgttgccacccagcggcaatacgctcaggtagcggagaatattgttcttgtagaccgaaatggtggtggtatcggcgccgaagtctaccagtgcacagcccgaacgcatctcgttttccgttaaaacggcatttgccaacgctatcggagcgataagcaggtcggctatctctacctttgcctgctcgaagctgtgttccaggttcttcttgagtgaggcgcgtgccacgatgttgaggaactgtcctgtgatgtgctggcctgccacgcccaccgggtcggcttgcagggtattgtctatcttgtattcttggggggccacatccagtacactcatgtctgccaacggcacttcaaggttctcgtcacagatagagtctaccagctcttgcgagatgatgccttcttcgtccagtgtacgactcaccgcgttttttactgtgcgcaatgactgtccgccgatgcctacatatactttggcaatggagttgttgagctggttttccagcttgttggtgatggaagtcaatgcctgtgctgtcttgtcgatgttgtagatgacccccttgtggataaacgaggacgcatcttcgcgtgcataggccaacacctgaatgcttccgtcactgttcttctttcctgcgataccggaaatcttggaagaactcaactcaatagcggcgatgaaatctgttgttgccataactgttttatttactattttactatttactgtctactatttgctgcgcggtaactattctcttttcgtgcagataatctggttaccaaactcaacactgatacgggaatatttgttccagcctaccttgttcaatcctttttcgtagaatacctttacccgtttcagtttccgttcgaagtcgtccagcttaccgaggtagatgacatggtcgcctacgcgcggtaccagctctatgtttttgtcgggcaatacatgaatctgctcgatttgcgcgttccagaacgaattcttttgcaaaaatacaccaaacttatataaatccctcatggcaaacgacttttctacgtttccggtcacaatggcacggtgcgcaacgcactttgcatcgggcggcattaccgtgcccttattgtccagatagtagttctcgccgttggcgctcattatcctcaggatagggatgcgctgggttacttcgatacagagtttgccgctcggcgtcttgtaacattccacttcgtcgatgagcggatgcttggagagcgcctgctccaacgttttggtgcggatacggtccaagtgcttgcctatgggactgacgcctttcttttccagcatggcggctacttcctttttcgtgatgaagccggcatataccgtgtctttgataaccagctccacatcacggcacacttgacccgccggcttccggttgaaagcggtaacggccactatcaggtaggcaaggatgagcaacaggacgatagaaagtagaatccttttaatcataggcttatttgctgtttactgttttacggtttacgctttgctgcgctgttcgagcagccgggctatggaaggtacatagttgtccaggtctccggctcccagcactatcagcacttcaaccggtttcttcgagagcaggtcgggaatgtcttccttcctgcatatgcacttttcgatgcccgggcgcaggttgtcgtatatgagttggctgctgacaccgggaatgggttgttcgcgggcagggtatatctctgtcagaattacttcgtccagtagcgagaggctgtctgcaaagtctttgtagaagtctctggtacgggtatagagatggggttggaagatagccgttatcttcttgtcccggtaaagttcgcggatagacttcacgctttgcgctatttcggcgggatgatgggcgtagtcgctgaggaatacgagtctgtccgtctttatcttgaagtcgaaacggcggtctacgccgcggaaactggccattccctgtctgatttcctcatcggtgaccccgttcaggtgtgcaagcgccatggctgccacgccgttctctatgttgatgccgataggtacaccgagccggatatcgttgatgcgggtgtccggagcaatgaagtcgatgacgatttcaccgtttccgatgcggatattctcggcatggaagtctccttcgtcgcgggagtaggtataagtttttacgcccggctgtacatccggctgcaaggcaagccccttccggataatcagtgcccctcccggttggataagggtggtgtagtggcggaagctttcaagataagcctcgcgcgtgccgtatatgtccaaatggtcggggtcggtagaggtgataacgctcatatagggagaaagccagtggaacgaacggtcgaactcgtcggcttcgattacggtgtacggactggtcggagataagagcaggtttgtcccgtagttcttggagatgcctccgagaaaagccgtgcagcccacatgcgactggtggaagagatgcgccgccattgtacttgtggtggtcttgccatgcgtgccggcaacgcagagtcctttgctgctgcgggtaatcgtgcccaatacctgggaacgtttatatatctcgaaaccattctcccggaaatagaccagttcggcatgttcctgaggaatggcaggggtgtacaccaccagtgtgctttccttgtccttgcaattttcagggatgagaccggtgttttcctcataatgtatttgtgcaccttctgcaatgagatgcccggtcagttcgcttggcgtacggtcatatcccgccacgaacttgcctttggatagaaaatagcgtatcagtgcgctcatgccgatgccgccggcaccgacgaaataaacggattttatggtttctatattcatgtacttgtcatttaataagtttcagcacctctttggcgatgacggttgccgagtcgggcaatgccaatcgggcgatgttgttgctcaattctttcagtttatcactgtcttttaccgtatccagtgctgcgggcaggagtttctcttcggcttccgcgtcctttacgtagatggcggcgtctttatcgacgagcgccagtgcgttcttggtctggtggtcttctgccacattgggcgaggggacaaggattacaggcttgtgaagcaggcagaattccgaaatggagccggcgccggcacgggagattaccaaatcggcagccgcataggccttcgccatgtctttgatgaaatccgtcacatacaggttgggtatggcattgatatgcgggtggtgtacggcttcaccggttgccgcggtgatggcgtcccttacctggtcgatgtatattttgccggtctgccagatgaactgtatgtcggggttctgccggatggcgtcaaggccggtggtcagggtacggttaatggtgcgtgccccgaggctgccgcccagtatcaggatggtctttttggacgggttcaggctgaagtagcttacggcttcttcgtgcgcaacggcatgtccgagcaagttctggcggacggggttgccggtcatgataatcttctctgcagggaagaacttttccatgccttcgtaggcaacgcatatcttgcaggctttcttggcaagcagcttgttggtgacacctgcataggagttctgctcttgtatcagggtaggcactcccatcattcccgccgttttcagggtagggccgctggcatagccgcccacgcctactgccacctgcggacggaattgcttgatgatgctgcgcgctttccattggctgcgtgccagtttcaccaatacggcaaagttcttccacaagtgcctgcggtcgaagcccgccacgggcaggccgataatcttgtagccggcatcgggtacacgctgcatttccatgcgtccttctgcacctacgaacaggatttccgcatcaggacgcaattccttaattgcgttggcaatggatacggccgggaaaatgtgtccgcccgtgccgccaccgctgatgataatgcgcggtttgttgttctttgtttccatatatgagtttatctacttgctactactgataattaatcttattcaaattcggcatcgctgttcagcatcttggctgtcggctcggcagcgctttgcgcttcgctgtaggtgctttcgtttccgttgccggtttccacctgcatggtgatttgggcatcgtgcgctctctgttcttccagcttggcggtgtaccggctcacactcagtatcatgccgatataggcacagtttatcaacgtcgaagtacctcctttgctgattagcggcagcggttgcccggttacgggagccagtcccacggccaccatcatgttgaagatggcctgcgacaccagcagcagggctatgccgatgatgaggaaggcggggaaggtacggtcgcatttctttgcgatacgtcctacacgtatcaacagacagatgtagaggaatacgactatgactcctcctaccagtccgagttcctcgatgataatggcaaagatgaagtcggagaatgcctggctcaggaagtcacgctgtacggagttgcccggtcccttgccgatgacattgctggtggcgacggcgatacgtgcatgggctatctgggcgtctttgtctatatcgaattttgcggcaggcactacctcgtcactcgtaaacttctcgatacgggcacgccacgtgtcgaaccggtgcaggaaaggtatgtcgctgttcttggtcatcagcaggaaagttacggcaacaatgcctaccgatgccaggctgccggtcagcatcaacagtcgttttgcagagacacgccctatgaacatcatcagaaagactaccccgaacagcaatgccgccgtggataagttctccggagcaatgagcaggcagataactccggttattatcataatccgcttgaaagccttcgggttggcgccgtcctcatcctgccctttggacaggatgaaagccgtgactatgataaccgccattttggctatctccgagggctggaactgtatgcccatgaacgtcatccagcgcgccgccccattgatacgttccatcatcatgaccagtatcagcagtattgcggaagccggcaacaggaagacagggaatacctgaaaccatttgtaggggatgttgtgcatgaggaccacaatcacagcgcctaccatcaggataatgctgtgctgggtgatgggcccccaatggtcgccgctcttataggtaagcgtactggcagcactgaacacctctgtaatggagatgaggcagaggaagaggaaaataatccagattactttgtctcctttgaatatgctttttaataaatccatttataactctcttacgtatttcttgaattggtcgccccggtcttcatagctcttgaagaggtcgaaggaagcgcaacagggactcaataatactgtttcgcctttccgggctaatttgaaagcggcgtctaccgcgtctttcatgccggtctgcacatcggccaccggcagaccgaggcggtcgaaaaagccgtgcagcttttcattgtgcagtcccaggtagaccagcgcggagcatttgctacgtaccaaatcctctatttcggtatagtcgtttcctttgtctttgccgccgaggataagcacggttttggttgtcatgctttgcagggcgtaccagcaggaattgacattggttgctttggaatcgttgatgaattggacgccgcgtacggtcgctaccttttccagacggtgctctacacctttgaagtcggacaaggctttgcggatatcttctttgcggatacctgcaaggttggcggaaatgccggcagccaatgagttatacaggttgtgggttcctcgcagggcaagttcttcctgctccatgttgaaagcaatcggttcgttgatttccacttcaccgtcttccacataagcgatggcgccgtcttcctttacggcggcgaaaggatagggatgggcttttaagccgtgcttttccagctctctgcggatgatggggtcgtcgttccagtagatgaaagcatcttccggagtctggttttgcgtgatgcggaatttggcatccacatacttctgcatgcagtgatcgtatctgtccagatggtcaggggtaatgttcatcaggacggcgatattggcgcggaacttatacatattgtccagttggaaggagctgagttcgataacataatagtcgtgcttctccatggccacctgcaaggcaaggctgttgccgatgttgcctgccagccctacattcagtcccgcactcttgaagatgtggtaaatgagcgaggtggtggtagtcttgccgttagaaccggtgatgcaaatcattttggcgtttgtataacgtccggcgaactctatctcggagatgatggagatgcctttttctttcaatttcagaatcagcggagcgtcgttggggatgccgggactttttaccacttcatcggcattcagtatcagctcttccgtgtgctgtccttcctcccaggcaatgccatgcttgttcagcagttccttgtatttgtctttaatggcagacatgtcggatacgaacgtgtcgaaacctttcaccttggcaagtacggcagctcccgcgccgctttcgcctgctcctaaaactacaattctactcatatactattataattaagaatggagaatgatgaatgaagaatccggctgcatattgtgatgcgctgtatcggtaactcttcatttttcattcataattcttcattgggttgttatcttatctttaacgttataattgttattgctgccagtacaatggttacgatccagaagcggacggtaattttcgattcatggaacaattgtgccggttgggtaaataccactttgcaaccgggctctatcaggttcatgccggtgcggaagtggtcgtgtatcggcgtccgtttgaagagacgctgtttaacccctttccgtttgccggctttgtagtagacccgttgcagaattaccgacaggttctctacaaggaatatgccgcataggataggtatcagcagctctttatggatgataatggcgtatacggcaatgatgccgccgatggtcagactgcctgtatcgcccatgaatacctgtgccgggtaggcgttgtaccagaggaagccgataagtgcaccgatgaaagcgcagataaagattaccagctcttccgaacccggtatgtacatgatgttcagataaccggcatattcgatatggctggatacgtatgccagtatgcccagtgtcagaccgataatggcggagttgcccgctgccatgccgtccatgccgtcattcaggttggcgccgttggaaacggcggttactacgaatatggtgacgagtacgaacagtatccagcccgccgtttgtgcgtgttctcccatgaaggacacgaggtcggcatagtcaaggttgttgctcttgaagaaagggatggtagtctgtgtagccttgatttctttggcggcatgcactacctcgatgccttgtcccggtttctctacctcgatgttttcacggataacgacctgcggactgagatacagggtaagccctacaatgagtcccaagcctacctggccgataatcttgaacttaccgtgcaggccttccttgtctttcttgaatatcttgatgtaatcgtcggcaaaccctaatgaacctaaccacacagtggtgataagcatcagaatcatatagatattattcagcttgcccagcaacaggcagggaatcagaatggcaaagataatgataactccgcccatgctcggtacgcccaccttgtttacgccgaacgggtcgatgttggcatcccgttgcgtctcggtaatctgtttgcgtttcagcaggtcgatgaacttgtcaccccagatgctcgaaatgagcaatgccaggatgatagccatcaatgccctgaaagatgtatagccgaacatacccgcaccggggaagtcgtatttatctaaccattggaataagtagtataacataatttcttactttatcactttaaaacattatcgcctttagttcctctttgtcatcgaaatgatgcttcactccttttatctcctgataattttcatgtcctttaccggctacgagaatgacatctcccggttgcgccagcatgcaggcggtctttatggcttcttttctatcggcgatactgattgtcttctgcaaatcgtccttgtccaaccctgccagcatatcgttgatgatgtcttgcggctcttcaaagcggggattgtcggaagtgatgatgacacggtcgctcaaacgggcggactctttagccatgataggacgtttccctttatcacggttgccgcctgcgccgactacggtaatcactttgcctttgccttccagtacgccgtggatggcattcagcacattcaccaacgcatccggagtatgggcataatccacaatggcggtaatgcccttcggagagcggatagagtcgaatctgcctgctacagggtgcaaagtgctgagggcaacgagcacatcttcttctttctttcccaacagtacggctgcgccgaatacggcaagaaggttggaagcattgaacttgccgataaagcgtacggccagctcatggttgttgaagtcgagcagcatgccttcaaaatgagactccaatacttttcccttgaaatcgctgaggcttctcaatgaatacgtatatacgcgcgaacgtgtgttctgggtcatgaccagtccgttcttgtcgtccagattggtcaggctgaacgcgttcttaggcatgtcgtcgaagaacttcttttttgctttgaggtagttttcgacagtcttgtgataatccaggtggtcgcgcgtaagattggtgaagatgccgccggcaaacttcaaaccgctgatacgctgttgtgcgatagagtgggagctgacttccatgaatgcgtatttgcatccggagtctgccatctcacccagcaggcggttaagggtaatcgggtcgggggtggtatgctcggtcggtacggggcggtcgtcaatgtagttgcataccgtggaaatcagtccgactttatatccgaaataacggaatgtattatacaataaggtggcaatggttgttttgccattagtgccggttacgcccaccagctccattttggaagtgggatcaccgtagaaagtggtggcaaccttacccaccgcattttcgctgtcttttacttggatatatgtaacatcaggatttgtttcttccggcatgtcttcgcacagtacggctatagcgcctttttcaatggcggtagggatatatgcgtgaccgtcggtctgcgtaccgcgcattgccataaacaaatgtccggccgcaactaaacgggagtcgatattcactcctgttatatctttctccgtactgccgataatttgtaccggttgtatcgcttttaatagttcgcttaatttcattccttattatataataatgtatattcttatattaacgtaatgtcaaggctattgtctgtccttttatcaatcggcttccgcctgcgatggactggtttcttaccttgccgatgccgttgaggcgtactctaagtcctttgctttccagcagataaacagcatccttagcccccatgcccactacgctgggaactatgccgtcagaaactttctgattttgcaggataacggcggacggggcagcctggctgtgtccccacaactctctctcgttttctacctcaaactgtttctgcaccggaacatccaatgtgttgagcacgcataatgcctcgttcatctccccggcttttactgcaggaattacattggtggtgctgtctatcgcactgcgtatatcgaaccgcagattcttggcatataccctttctgcaatcttgctgaatacgctacccgccatcaagccgcccgatgccggaagtcccggcttctgtatggaaacgatgcaactgtatttgggagcctctgccgggaagtatccgcagaaactgacgagataattcacccgtcccgccttatagccggcggcaccttgcgaaatctgcgccgtacccgtcttgccggctacggcaaactgtttgcttccggcgggtttggccaaaccttcggcaactactttgcgcagaatctcccgtatctgtgtcagcgtattgtccgagcaaatcttcggattgataacttccgtaggaaagtcacggacaacctcaccgtctttcactgccgcttttacgaatttagggcgcaccattgtaccgttgttggcaatggcattatagaaagtcagtatgttcagtggcggtacctgcgtttcatatcctatactcatccagggtaacgtggtcttggcaaaataccgttctttcggaccgcggatgttaggtttgccctctccggctatttgcaggtggagcgggcggtctataccgatgcgcttcaatccgtctacgaacttctgcgggttgtcgctgtagtgcttgtcgataagatatgaaacgccgatattggatgatacttccagaatacgtgtcacatcaattttgccatatccgccccgatgccagttatggtctttcatcgggcggccgtgcatcatcatgatgccgttgcctgtgtcgacttccgtatggggagtaatctttccgtcttcaagggctaccatgatagaggctgtcttgaatgtggaccccggctccagcatatcgctgatggcgttattacgcatttcgtaatagttgccgtcgcccgctttcatcatgttgacaatggcttttacttctccggtctgcacttccatcaatacggcaacgcccacactggcgtttatctctttcagcttgtctatcagtgctttctcgcaaatatcctgcatacccacgtcgatagtggaaatgatgtcgcaaccgtctacgggagcaatgtccactatgttcaggtatttgttcatcaccttctggcgatgggtgataccgtcacgtcctttcagcagcgtatcaaaggcaagttcgataccgtttttggctccttgcgctgtatcggcgtagaggtcgccgagtgtacgtgccgccagagaaccgaaaggtttcttacgctggttgaaaggctgttcatggaagcctcctttgtatttgtttagtttgaataccggcagccttttaacttctttgtattggatataggagatacgtttcgggtaaatcaggtaattgcggctaccctttttacgtcctcttaacagatgtcttttaaattcggcggcacttttatcggggaatatctggtgcaatccttcgcagatttctcccagatgattcataagcatggtgtctttcttctctccacccgctttgaagtccatgtaaatacggtactccggtagggagctcgccattaatttaccgtccgatgaaaggatattgccgcggttgggcttcaccctaacattctccttcacaaagcggtcggcaacatcttgccagtactgacgttcggcaaacatgatgacagtaccttttacgataatagctactcctatcagtcccatgacgaggactacgaagaagtagcgggtcattatatttttcttgtttactgccaaggttgtttcgatttactattatactatattacagtttacttgtttatcggtttgcttaccattatccgtacttatttgattaagtatggcggattggtcgaagtctgcaaatcgctctctttcgttgcgatgtattcctcgatacgcgattgacggctccgttccatcagttcggaactgcgtgtcagggcatcgtattttatatctatcagttctttcttgagcttgtctatctctatcatctgctgctggcaggcgtaacggttatggatatagaacagaataagaaccatgatgaggacaagcagcttcgtctgacggcggaaaaagtccgtagccagaatatcaccgcctataatgttctttagcgaagtccgtcttttcaccttttcgcctttttgctcctcttgtttattatttgtttcattcatcgttctatctctttacagccttatcgcttccctcattcttacagtttttccgcaatcctcagcttggcgcttcgcgagcgcgggttgcgttctatttcatcgttatcaggaacaatcactttattgtttaccagacggaaaggcgtctgtatgtttccgaagaagtctttttccgccttgccctctatgttgccggtcttcatgatgtttttcaccatgcggtcttccagcgaatgataggtgattaccaccagccgtccacccggctttaatgcttccgtggctgcatataacatctctttcaatgcttccatttcccggttgacttcgatgcgcaacgcctgaaacactttggcaagctctttcttttccctttcacgtccgaagaggggcttgataatttccagaaattccccgatggtgccaatcttttgaacggcacgtgccttgacaataacggatgccagcttgcgactgttcttcaattctccatacaaatagaaaatgtcggcaaggcgttcttcatcgtatgtatttacgatgtcggcggctgtgagtccggcacgcttgttcatccgcatatcgagggcgccgtcaaaacggaacgagaacccccgttcgctatcgtcgaaatgatgtgacgacacaccgaggtcggcgagtacggcatctacctgctcgatgccatgataacgcaggaagttatgcagataccggaagttgctgcgtacaaaagtgaagtgcggatcgtttacgatgttccgttcagcatcttcatcctggtcgaaaccaagcagtcttccaccgtcgcccaagcgggagagtatctcgcgggaatggccaccgccgccgaatgtcacgtctacatacgttccgtccggacggatattcattccgtcaacgcttggcatcaacagtaccggaatatgatatgttgtttcttctttcatttttctttcattacaatcgttctattactctacgctcttatcgcttgtctctgcttcttcctctcccaggttttcctctcctaaaatatcttgcagcgcttcgctgaattcttccgggtccatgaaaggctgttcagccttttctttcgcccatatttcgatggtgttgtccacgccgataaagcgtacctcactttgtatgcctgccatttgcaagtagcgtttaggcagcaggatgcgtccgttcccgtcgggaatcatgatttccgcatcgcttacaaactgtcggaaaatttgttggtgtttcgcattccatttgttcagccgctgccggagttggttttgcgttttgaaccagacgctttcggggtagagtatcaggcagtcctgaaatacatccttacgcaatacgagtctctcctcggaagcagcctgcaactgtttccgaaagccggcagggataaatacacgtccctttgtatccgtctttgcttcaatattgcctaaaaagcgtatcatttttcaccttattataataagcgacggtaaaagtacacatttccccacaattccccacaatgttttaactaaaatcttatttagaagttttcaacagcttgttgattacttattctattgaaaatgaacaatgtgttatgttgtttgtttggtggggaactggcgcagttatctgctgtaattgcattctataactgccgttccaacggagaaaaatagggtatttatgagtgcttttctttgtattgtgtgggtgaatatcctgtatattgtttgaataccgtactgaaatatcttgatgtggagaatcctgtctgttcggagatttcattaatgctaagtttgctgttggtgagcagaaaaatagcccgctcgatgcgtagtttagtgatataatcattggctcccatgcctgtaagggctttcaacttgttatagagtgaagcgcggctgactcccagttcctggtagaggaacggtattcccatttgagcattgtccaggttgtttgatattaacttatttagcttgtgtaagaaatcttcatccgcagagctgaaagtgctttctttcggctcaggcaatgagcctgtttcggtgtaacgcgcgcgtatccgttcacggttctttaattggctgcgtatcacgccgtgaagcatattcacttcaaaaggcttggtgaggtaggcatccgccccgttcttgtatccgaagagttggctctcatcatcgttgcgtgctgtaagtaatatgacggggatatgactgatttcaagttcttctttgatatgtttacacagttcatacccgttcattcgcggcatctgaatgtcgctcaccacaatgtcgggctggtatttccggcaggtgtgcaaggcttcttcaccattgaaagccagccatatcttcttgaatttgttttttagagtgttgtgcaaatagtcggtcaaatcgacattgtcatctacaatgagtagcgtatgttctttggtgttttcctgattgtcatcggcatcaggaatactttccacttcttgggtgggagccaataattcgttgaggtaagggtgaggttgcagcgtgatttctccggactggatattacggggtatttcaaaccagaaagtggctcctggaaattcttggtggtcataagctcctatgcttccaccgtgctgctcggcaagaattttggaataggacaacccgataccggttccgggacgactgttgttaccttgataaaaacgggtaaacaagctgtttatgtctacttcctttaaaccgattccttgatcggaaacagagattcgtacgcacttcttatcatccgataagtcggcagaaaccataatccggctattgtcgggactgtatttaagagaattgattaaaagattggttagtatggttgtacatttttctttgtcaaaacacaaactgtcaatcgccgcgtcggtcctgtaccggatgtcgatgtttctgttccttgcttccggtttgaaatctgcaataagttgttctatccagtcgttcaacgctactttttcaatgtttagtgtactttgttttacttccattttacgtacgtccaagaccatgtttaataacttcttcatacggtcggactgtttgcaaatgttttgtatggtttcatatttacaatcgtcggaagtgagcgattccaataattgctttaagggggcgtgtatcagggtcaaaggtgtgcgcagttcgtgattgatatttataagaaagcggactttttcttcatacacttgttgttcatgctctttcattgcccatttcagtttgtttgcattgcggcgcaacaacgaatagataatacccgttgcaagagaaagaatcaatgccaagcagcatgccttaaaccagcccgacttgtaccagggcggcgataccgacagttctaatatctgataatcgccggtccagcttccgcttcgggtgctgcatgaggccgatattcgatatgttcctataggtaagttgttcaatgtcagttccggtttgtaggaataagatatttgtccgtccggtccatgtacggtaaaacggaacatcggctttcgaaagatatccttgttgccggctatgattttgatagatataggcttgtttgactctatgacttccagatgcctgtgggtgatattgttattcattcgttctccgcccacccatacatccgccaaatttaaaacgggatcactgttttcctcttggggcagttgcctgttgatgtgaagtaatccgttgatgccgcccatataaatatctccttgcgtggatagtagtcgcggcttttccaaatattcgttaagtacgatgccgtcggactctccgtaaaggataaattctttttcttcaataagatgagcaaataatttgccttcggttccaagccacacttttccccgcttgtcacaaatcaatgcgctgatttcgtcgattaattcattggagatacaggtccgcttattgcttatggtagagtaataacttaaaccgtggttgcttcctatccaaaagagtccgttttcatcgagggaaatagagttgaacacagtgtcttcgtagcaggtgtggatgggtagaagccggttaaggctgtccaatcggtatatatgtttgagatcgtgcaggaaactgcgggtgctgtcattgcacaccggctgtattacaccgtctatagctgtttttccaacggagacgattggagtgaatttcttctttgtcaaatgatagctatatggagattcggaaagcaataatacggtttccggtgtattttggagtacattgacatttttcccccgttggcatagtaatgtgttgatgctgtcattgactataatcagcggttgatattcctctgtttccttatcgaaaaagaatatgcctttgctgaataatgaaattaacagtcgccttttgtctatgccggttattgaagatactttatcgccccatgtcggtagtatatgattgaatttccgggtatcgggattaaacttgttgatgccgcctccgtccgtgcctatccatattttttgttcttcgtcctgatagatgcttaatacgacttgaccgctgaggccatattctattccgggtaaagcctccgaataggttgtcatacccgtttccttgatgtttatcaatccaccccatacgctgcctgcccatatgttgttattgaaatccttgtataggcagagaatggagtttgttggtaacgagttacggtttcccagcacatgttccaatgacaccatttctccgttttcaggatttaatatgaagattccgtaaccgtcggttcctatccagatgtgtccgtcgcattccgtaatggatagtacaacgttggttttcatggacgaattcatcgtgtggtaagcatgtaaaagctttccgttgcgatcatagcattttacgccttggtggtatggggcagtccatacattgcctttagagtctatgaagcagtccgtcagctcatcacttttgaagggagcgggttgtgtctttcctgtccgtatgtcaatcagtaatgcgtttttccaacggtttatggcaagcagtgtgtgtttgtcccattttcgcaaggtagtgatattatagtgattgtcgggttgcagggagcaaagcagttccgtttgccggtcagcatagttgtatttataaatctttccgtatccgccaaataaaactccgtctgtccatggacagatagaggcggcagaaagtggatgctgttctttgtctttcgcttgcaggaaattatcatccgattcattgtagtaatacaggcctttggcggtaacagcccagattttgttttcgttatcttcaaacagatgggttatattgtcgtggaggtattttttcagttcgtatccgtcaaaacgtcctatgccggtgcgtgtacctacccacacatatcctttttcatggctcacggtcaggcatcgtacggaggaagataagccgttttggatattgatgatttgctggaaagcatactgcttcatttctgtagccttaaaaggaagggataacaataggcaaatcattaagaagactggattttttttcataaggatagttcaaggggttgctgcaaaagtagtttattgttttggaaatacaaagtattgtgccaaatatccggtatgagaaagtaacttatttccataacattatcttgttgtttctgagcgaattcttaatttttcctgttctcgtcttcggaaagtaacgggagaaataaggccgtcaatagctttaaacaggatattctcttatgcgttttgtctttgtatatgtaccaaaacctcgttttgtaattgcgggctctccggttgccggttgcgggccgtacggttgccaactgcgggctcttcggttgccaattgcaaaacgaggaaaagaaacaggtatagcgatattatgtatgaagctttgcggtattatatataaggcattgttgtattccgtaccggagataaccggcatgaaatgtggtaaaaaacaaagaaaacaaggtataatcagttttctgtcgataagtgtcaaattcctgttttacaggtgattggtgtggaaaagtgcaaaaaaagggtgatgaccaagtatttgtcgtcacttgtcataacgcttctcatcaccaatcaaattgtacattatcagttggttaagtgcaaaagtgacgagtgatgactgattaatcaaaatatcggtttctatacttgagtgtgtttttcggtatatcacacattccaatgactggttggtatgtcagatttgtattgctctaaagtcattggcgcaatcttaaaaaaggctctacaggtatgtacagatgtatgttagttaaatttggaaatagaaatagtgataattgaacatctgtttttacggcatgatttacatttgtccgtgggtttacaggacataaacctgataaccgaattaccttataaatttaatattatgaagaattgcttatgaaaaagatttgtttcgtttttctattgctccttacgttgattcctttaggagtatccgcacagcaacagatgattcaggggcgcgttctcgacgataaaggcgagagtattattggcgcatctgtttccgttagaggtacagttaccggtggcattactaatttggacggtgagttttccgttgccggcaaagtgggggatatgttgactatatcttatataggatatactccgttggaggtgaagattaccaagctgaccggtaatgtctatacgttgaaagaagactccgaactgttggaggaagttgtggttgtcggtatggataagcagaagcgtaatactattaccgctgctgtggcaactgtgaaatcggaagccatcaccagccgtccggtaaccgacctgaccagtgctctgcaaggaaatgttgccggtctgaattttgcttcggatgccgctgccgatggagtaggtggtgagacgggcgctgaaataaaattcaatatacgcggtgtcggttccattaacggcggcgaaccctatgtattggtggacggcatcgagcagagtatgcagaatgtgaaccctgccgacattgaaagtatcagtgtactgaaagatgcctcggctgctgctgtttacggtgcacgtgctgcgtatggcgtagtgctggtgactactaaaagcggaaaacaggagaaagcgcgcgttacctatcgcggttccgttggtttcagctctcccattaacatgccgcagatgatgagctcattggaatgggcgaggtattccaatttgcgggacgagagtatgggacgttctcatcagatttccgatgcaactattcagaaaatggaaggttttatgcagaatccttattctgccgagtttcccggtatagatgtcaatcagtcgggtgacggttgggcggcagccgataatgcgcagtatgccaataccgactggttcgattattatttcaaggaccgtgctatccgccattctcataatatcagtatacagggcggttcggaaaagacttcttattatgtaggtttgggttatatctaccaggaaggcttgatggataaggtgcaggatgatttggagaagtataatgtgaacactaagttttccatacgtgctacagattggctgaagttcaatttcaataataatgtgtcgttgagtcttttgaaacgacctttggcaaaccagactattttttatggaacgatagctaatatgtcgccaagccgtgtcacgaaactccctgtcgagcaggcggagtattccactcctacgtggaacgagcaactttatctgcaaaaggcgggctatagccagaatcgggtatcggatgcaatgtctttttctgcaattatcactccgctggaaggactggagtttgtgggcgagatgaaagcccgtttggacgtagagaacaatagtttcgagttgcgtaaaggtaattatgcgttgcctaatggttctgtaatggaagtatcgggcaataagcagggataccattatcccggtatgaagtggcagaatacccagttcggttcgctgacgcgcggcagtgtgttcaattactatctttcgcccagtgtgaccggtgcctatacccgtcagtggggcgatcatttcttcaaggggatggcaggctttcagatggaattgcaggaaaactccagtgagtatatgtataaggacggtatgttgagcgaggatatttactcttttgataatgccaatggaactccctatgcagccgaagctcggtcgcattgggctacaatgggtatgtttgcccgccttaactggaactaccggaatatctatttcttggagttcagcggacgttacgatggatcatcccgttttgctccggacaatcgttggggatttttcccatctttctctgccggctacgatatttcacgtacgccttattttaccaaacttaacctgccggtgtcacagcttaaagtacgtgtgtcctatggtcgtcttggcaaccaaaacggtgcggggctttatgattatctcggcgtgatgacactcgacccgaacaacgtgaatgcgtggttgttgccgggtacaggcaataaacccgccaaaggaaccatttcgcttacaccgaaaatgataagtccctacattacttgggaaaaggtggataatgccaatatcggtttggatttgatgctgttcgatgaccgtctttccgtaacgttcgatgcttatcagcgcatgacgaaagatatgattggcccggccgaagctattcctgccgtcagcggcattgtaccggacgaccgtgcaaagataaacaatgccactttgcgtaaccgtggttgggaactttccgtcaactggcaggataagttgaaatgcgggttcagctatgggataggttttaatttgttcgattataaggctgttgtaaccaagtataataatccggaaggtatcatttataataatcataccggtttggcgcgtaataaaggatattatgagggtatggatatcggcgagatatggggattcgtggccgacgaccttttcatgaccaaccgggaagtggacgattaccttcagagtaaggacctctctttctttaaggcagataatctgtggcaggcaggtgacttgaagtatatcgatgtcaatcgcgacgggaaagtggatccgggaaaaggtacgttggacgaccacggcgacttacgcatcataggtaacaccactcctaaatattctttcggtatcaatctgaaagcgggctacaaaggtttccaggtttctactttgttccaaggtgtgggtaaacgcgatttcccgttggcgggcagtacttatctgttcggcggaaagaactacttcaaggaacatctggattatttcagtccgcagaatcccgatgcctatctgcctcgtctggccgatccgaagacagacgattacagagtaaatgccgggtataatactactcgttatatggtgaatgcggcttatatgcgtatgaagaaccttacggtatcctacacattcgacaagaagatgctcaaggcattgcgcctggagaatttacgtctttattttacttgtgataatttgtttaccattacctcattgcccaagtcgttcgatccggaaactctgaatcaggtgaatacatgggcgggcggtagcaacgatacggctccgggactgacatccgctgccaatgagaacggtaacggtaaggtatatcccatgaacagaaactttgtgtttggtattgatttcacattttaactaagtattggtaacagaataaagagtatgaaaaaaacttatttatatattgcattactaatgggagcaagcacgctgttttcatcgtgctccgacttcctggacagagaaccgataactgcaccgaataatgaatcgttcctttcgggcgaatcacaggtacgcggctatatcaacggcttgtacacggcattaccttccttgcagaaattcggaatgggagtgcgcggtgaagagaaaaacagcgataacatcctgtccgaaatttacgataggcgcctgaatggcgaagaaacggtattttccagtaatcaagcttgggaaaccggttataagaacctgcgcaatgtcaattatttctttcattactataaagtacccgagaatctggaaacggaagagattaaatcgctgattggcgaagcctactttttgcgggcctattggcattttgtgcaactgaagaagttcggagatattcccgtgatggatgctttttgggatgagaacgctactatcgccggattgcagattccgcaaaaagaccgcagcgaggtagcaaaattcattcttgaggatttggataaagcgaaggatttactgttcgaccgtagcaaatatgcaggattgcgtatttcaaaagaggcggctatgatgcttgccatgcaagtagcgctttatgagggttcttgggaaaaatatcacaaaaacgatgcctttgcagccgatacggaccaatccgagtacttcttcaatgaagtgctgcgttggggcgatatgttgcttaacagcggattgcaactgaacaccagggatacggataaagatgtggtgaatccgggagatgcttacggacgtcttttcaatcagaaagactattccaatgtcactgaagccattttttggaaacagtactctattacggaaggtgtgtttcatgccttgagcggattacttgccggcggtgtggttgaccagaacggtcctgccggggtatcgggtgaattggtaaatacatatcttagtgcagacggaatacctgttgacccgaatgatgaaaaattcaaggatttcaatgaaactttcaaaaatcgcgatttgcgtcttacggaaactgtgatgagtagcggctataaattcaaatcgactatcaccggctccagaccattgaatgtgcaggatgtagcttccgatgccaaaggtatcaatccccctttcctgacgagtgacggcaatgccaagaacgtgacgggatatcatatacgacttggagtggatactacctatgtgcagggagattcggaagttgggttggttattatgcgttatgccgaagcgttgttgagttatgctgaggcagcggaagaattgggtaagtgcgatgatgccgtactggaaaaaacactgaagcctttgcgcgaacgtgccggagtgaagtatgtgaagcctgtgactgtcgatcctaatttcacagactatgggtacgcgttgacgcccgttcttcaggagattcgtcgcgagcgccgtgtggagctggcgttacagggctatcggttggacgaccttatgcgttggggcggcgccaaagttattgtcaataagcgtggacgaggcgcttatttgggaaaggatgcggtactttataaatcattcaccgaagagcagcaatcgaaacttactaccatactgaccgacggtagtcaatggatggatcctttgcaggaactgttgcccaatggctaccaatttgttgccggtcgtgattacctgcttcctattccgcccagcgaactcaagttgaacaggcagatgaagcagaatcccggttggggagaagagtaagaatatgatgcggttatttaattttagaaagaacagaccatgaaaaagagtaagaatatatattgcatattgttgtttgccgtgttgggcattaccggttgttcggaggagaagatggcgccgttacctgaacccgtacctctgaggatgagcattaatagtacggatttggtgatgggtgaaacgctggagattacttttgatgtcaccggtacggacgaaggtatgaaagcgatgaatgaggatgtaagcattaaactgagcgccactacggaaaaaggagcggtagaccgcctgttgttcgaaggctttcccaccgaagtcgttatgaagcagggagaaacgagcaagactattccggtacttgtgaaagaggggctgaataaagaatattctgtcgaaatatcggcttttgcacgtggctatagagtagagaatgccttgcaactgctcaccgtgagcgattatcattattcgcgcgtaatgataaaaaacaatgcggataatacagtgaaagagggacagagttttattttgacagcttccgtcaattctaaattgaaggacgaccttactatcgttattacgcctgcggaaggtgtggcccggcgtcttgagaaccttcccgaacaattggtgattccggccggagagagttcggtggagagtgaggctattatgatgataaaaagtacggaaaccattgccgatgaagatctgaagctcacgttctccacgattccggtggcaagccgttatccgttggtggcaaatgaaatcattattcacagaatagatatccataagggtatggatacgaagataagggatgaacggtggttgtacgaggatgccgaccaactcttcgtgtcgcctcaaaatgaagatgccgtgaagaaatggggacaactgaactatgtggtgatgaaagagggtgacccgcaccccaacagcggcaatgtgctgcccgacggtaaatggaagtttttccgcgcttatgagtttcataagattgatgcctgtctcacgacgaaggacagtccgatgggcgattatgtcagtaaggaatatccgtttggctttgccgaccagaatactgctgcggtagaaagtcaaggtgcggtggataatgctaagtatgcttatgtaatggatgaaggctatttgcgtatgatgacattgaaagagagggctaaatccggtaacgggggtaaggaatgggattatggaacatctgcattctattcttgtaaattcatgcgcggcaatgccaatagtacggcatgggcatcttccaatatccgtatttatccgggtatgcgcattgagacccgtgcccgtatccgcggtatggaaaatagcggtatgctgcccggtatctggctgcaaggcaatgagcaggtgggtggaaatgccgagtggaataactggcctgattttggagaaatagatgttatggagaataatagccgacacaataatttggcatacaggcgcggggtggaacaaactttccattttggtgctcccacgccggggaccagtaccggtgccggtgcttataatccaaccaaagctgtcacggaattggcttcgggcggcaagaccggaggtactattatagacgaattccagatttattgggtagaatggatagacgatgaaaccgttgccatagggacaaacggtgtagaaacgcttcgggtgaccaaagcgatgacagaacagaatggcggtcgctggccgttctcctacagtataaacagtgaagggttgtattacatcatcacgatgatgtttttgcacaaagcagagccgaatttcggtgcaacggatatggtgatgagctatcaggctgcacggaatatcttgaaagtgaatccggatataaagattccccgtatggaaatagactgggtgcgtttttatatagacgatacttatacggatcatgagatgccttatcgtaaagacctcattttgtattaatgtacataacaatgaaaaaaagaaagaacattaacctataaagaataataatatgaagattaagactattttgtgcacgttgtgtgcagtaactgtgttgggtagctgtagctacgatgatgatggattgtgggatgcggtgaacggtcaggaagaaagaatttccgcattggagaaatggcagaagacggttgtagaccaactgaattctttgcaagggattcttacggctaccgattatgtgaccaatgtggaaaaagtggaaaaggatggtgcgcaagggtataaaatctctttcctgcacgctaatgctattacattgtactataatgaagacagcgaggtcagtggcggaagcgatgcttcggttggtgtggcacaggacgataacggttattattggacgatgaacggcgagcctttacagatagaaggcaagaaagtatatgtgacagaaggaggcggagcttcattaacgcctaatgccggtaatcctgaaatattcgatttgacaattggcggaaccacggtgacggtagaccaaaatgcagtaggtgcacatcctattaaagaggtgaaggaagaaaacggcagggtgattgttacgttgaatgacaatacaacgaaagaactggtgaagtgggtgaacctgaaagatgctttgtcggcaacgtatgaaggcaccaacggaaccgaggtgacatatccgattgcccttggagccggacatatcatgagaaaggtagacgagactcctgcagggtggacgataaaggttacgggaataggtgctgatactaaattgattgttacttatccgtcaggcaatgaaagtgtaacggtagcttttctgatttccgacggaaatacgttatcggttgttcaggaagcgacatttacatcaacagctactcccggaatagcttggaccactgttacttattctgccaatacgccgataacgattcctcccggaactcaaaatgttaaggttacgggtgatgcttctgctttagctccagctgcatttgctacgaatataacaaatcctttgaaaggtactgccgatgtagtaaatattgacttatcggaaattacttatactaaagcatttccttccaacgctttttatatgaataccccttccgtacctgatacagataaaaatacttcaatagaaactataattcttcctgaaggaatcattaatatatggggctctgcctttaagaattgcaaggcattgaagagcgttacggttggtacggcgacagatgtaccggcagagcattcaggtacatggtttaccggatgcgaggcattagaatcgatatatgtaccggccgacaaagtggatacatataaggactcatgggatagcagtttgactgattatatcaaggcgataccggccgactaagttacaatctgtaagtataatcagaaacccaaatgccggaaggatgggtgaatatccatgcttccggcattttacatataaaaggaaacaacaaattaatcactgattgaatcatgaataaactacagaccggatggttgtatactttgacaggggcggtttcggcggtatcattggccgcatgtatgccggcttcaaaaccttacaacatcgtctacatcatgaccgacgaccatacggcgcagatgatgagctgctatgacaatcgctatatagaaactcccaacttagatcgcatcgccaacgacggtgtgcgctttgtcaatagttttgttgccaactctttgagcgggccgagccgtgcctgcatgtttaccggcaaacacacatgtggcaataaattctatgataataccacttgtgtgttcgacggttcgcaacaaacctttcccaaaatactgcgcgaaaacggctatcagacggctgttataggtaaatggcatttggaaagcctgcctaccggtttcgattattgggaagttgtacccggccagggagattattttaatccggactttatcacgatgaacaacgataccgttgtccgcaaaggctatatcaccaacttaattacagacatgagtatcgattggatggaaaacaggcggaacaaggaaaaacctttctgtctttttattcatcataaagccattcatcgcaactggctgcctgaaataaaaaaccttgccctctacgaagacaagacattccctttgcccgataacttctatgatgattataaaggccgccctgccgccgcttctcaggaaatgagcatattcaaggatatggacttgatttacgacctgaagatgttgaaagagggcaaagactccccactgaaagagcgctatctgagctacatagaacgtatggacgctgatgaccgtaaagctttcgacacattttatgcgcctatcattgaagatttttataaacgtgacctgaaaggtaaagaactcgccgaatggaaatatcagcgctatatgcgtgattatgcaaaagtggttaagtcgctggacgataatgtagggcgcgtattggattacctgaaagagaaagatatgctggacaatacattggtggtttatacctctgaccaaggtttttatatgggcgaacacggttggttcgacaagcgtttcatgtacgaagaatccatgcacacgccgcttattatgcacctgcccaaagggctggatgcacgcggcgacattacggaattggtacagaacatagactatggtccgaccatcctcgatcttgcaggtatcagtctgccggaagatatgcacggcatttccatgttgccgttactcaagggagagcatcctgtaaactggcgtaaggcattgtactatcatttctacgaatatcctgcagaacacatggtaaaacgccactacggagtgcgtacagagcgctataaactgattcatttctataatgacatcgatgtttgggaattgtatgatttgaaaaacgaccctgccgaaatgtataacatctatggccaacccggtaccgaagaagtgacagccgaactgaaaactactttactggatttacagcaacaatataacgacccggtgcgcttcggaccggaaagagataaggaatgatttatgttttacttgaaaataacgattttattttatgaaatactttataatgctattattatgctgctggttgcttccccccttgggctgccaggcagataacttgactcagcctttttcgttggttccctgtccggtcgcaattgtgccgggcacgggtaactttcaattcacggctaagacggtattcgcagtggaaaatgaagaacaggcggaagtcgtgaaacagtttaccgcgctttttacgaatgccgccggctttactccccgtataaaaacggaaagtaagaaaggagatgtttgcttgctaactgatgcttccttagattcggaagcctatctgttggaaatcacctcaaagaaaatccgcatttacgcatcggatgtacaaggctttttttatgccttgcagagtatccggcaattattgccggctgctatagagggtacacaggtggttaacgctttgtggaccgtacctgccatgactattaccgaccgcccccgtttcagctatcgcggattgatggtagacgtatcccgatttttcacgcctaaggagaatctgctgcgtatcatagattgcatggctatgttgaaactgaacaagctgcatttgcatctgacggatgataatggttggcgtattgaaatcaaacgttacccgctgcttacggaaattggatcgcgccgggtggaacgtccgggagcgccgttctttgcccgtcgtaatgcccgtcagggagaacccacggtggagaaaggcttttatacgcaggatgatattcgggagattgtatcttatgccatgacacgccatatcgaagtgattccggaaatagaaatgccggctcatagtaatgccgcattggcatcgtatccattgcttgcctgtccggtagtggataaatatatcggggtgttgccgggattgggaggagctcatgccgatatcatctattgcgctggaaacgatagtgtatatactttccttgaaggagtgattgatgaaatcgtagatttgtttccgtcaagatatattcacttgggtggtgatgaggcatggaaggttaattggaaaaaatgtccgcgttgtcaggcacgcatgaaagcagaagggttgaaaaacgaagaagacttacagggatatttcatggcacgtatggcgcgttatgtgcagagtaaaggccgcgaagtgatgggatgggacgagctgaccaataccgatattcccgaagatgccattattttcggctggcaggggcgtggacaggctgcattgaaagccgccaaactgggacatcggtttgtgatgactcctgcgcttatattgtatcttatccgttatcaggggccgcaatggtttgaaccattgacttatttcggcaataatactctgaaagatgtatatgattatgaacccgtacaaaaagaatggagtccggctgttgagaaacttttaatgggtgtacaagcatccctttggacggagttttgcaacaagcctgaggatgtggactatctgttgtttccgcgcctgtctgctttggccgaaggggcatggacgcaaaccgaccgtaaggattggcagacttatttaaaagcgatggaccggtttaatgaacatattgcggcgaagggaatagtttatgcccgttccatgtataatatacagcatacggtaactcccgttgacgggcaattacaggtcaagttggaatgtgttcgtccggatgtacagattcattacaccactgacggtaaggaaccggatttgcaatctgcactttattcggagcctttacggcttacgacatctaagaccgtgaaagctgccacttttgccaacggagagcagataggtaaaacattggttctgccggtggaatggaataaagcaacggctaaacctattttgggaagcaataccgaaaaactgaagttgttggtgaatggcgtacggggcagcttgaagcaaaccgatttcgaatggtgctcttggatgaataacgatacgatttcttttactgttgatttgcagaagaaagaagaaatccataccgtaacgttggggtgcatcactgtttacggaatggcagtacataaacctgcttgtatacgggtggctgtatctgataataaccgcaacttccgtctggctggagaattgcactattctcaaaaagaaattttccgtgaaggttcttatgttgacaactgctcgtttgccttggataatgtgcaggcccgctatgtgcggataacactttgcggagcaggcttgtgtccggaaaatcatgtgcgtccgggacaagaagcgagacctttcttggatgaacttattatagaatgaaaaaacgaatgtgtatgattgaccgtatgagccgacagatatttacattacttggagctatccttgcgttttcaccgcttgcagcacaagaacagccggaatggcaaagccaatatgccataggattgaataaattgcaacctcatacctatgtatggccgtatgccacggtaacggatgtggagcagggcgattacgagcaatctccctattacctcagcctgaatggcaaatggaaattccattgggtgaagaatcccgataaacgaccgaaggagttttataaaccgtctttttataccggtggttgggcggacattcttgttcccggtaattgggaacgtcaggggtacggtacggctatttatgtgaatgagtcgtatgagtttgacgacaagatgttcaaattcaagaagaacccgccgctggttccttacgaagacaatgaagtcggttcttaccgccgtacattcaaagttccggcttcgtggaaagatcgccgggtggtgctttgctgtgagggagttatctctttctattacgtatgggtaaacggtaagtttatcggatacaatcagggctcaaaaactcctgcggagtgggatattacggataaactggaagacggagagaatatgatagcacttgaagtttaccgctggagtgccggttcttatctggagtgtcaggatatgtggcgtttaagcggaatcgaacgcgatgtatatctgtatagtactccccaccggtatattgctgattataaagtgacgtcttctttggaaaaaacgaactataaagatggtcttttcggtctggatgtaacgatagaaggcgcttcacagaatgcttcttccattgcgtacacgctgaaagacgcggaaggccggactgtatcggcggaagagattccggtaaagtcacgcggattaagcaacttcatctcttttccggggaagcgactcccggcagtgcaggcatggagtgcggaacatcctaatctttatacattgtttctggagttgaaggatgctacgggcaaggtgaccgaagtaaccggttgccgggtggggttccgcacttcggaaataaaggacggccgtttctgtatcaatggggtaccgatattggtgaaaggtgttaaccggcacgaacattcccaactgggacgtactgtcagtaaggaattgatggagcaagatatccgcctgatgaaacagaacaatatcaatacggtgcgcaattcgcattatcctaccgactcttattggtacactctttgcgaccgttacggattgtatatgatagatgaggcgaatatcgaatcgcacggtatgggctatggcccggcatcgctggcgaaggatagcacttggttgccggcacacatggatcgtacgcagcgtatgtacgaacgttccaagaaccatcctgccatcgttatctggtctttgggaaatgaagcgggcaatggtataaacttcgaacgtacatacgattggttgaagtcggtagaaaataatcgtcccgtacaatatgaacgggcggaacagaactataataccgatatttattgccgcatgtatcgcagtgtggatgaaatcaaagcttatctggctacaccgggtatttatcgtccctttattctgtgtgaatacctgcatgctatgggtaatagttgtgggggtatgaaggagtattgggatgtttttgagagtaatccgatggtgcaaggcggagctatatgggattgggtagaccagtcgttccgtgagattgacgacaacggccgctggtattggagttatggaggtgactacggacctgaagatattccgagttttggtaacttctgttgcaacggtctggtaaatgcagaccgtgaaccgcatccgcacttattggaagtgaagaaaatctatcagaatatcaaaacaaccttgatcaatgaaaagaatctgactgtacgtattaagaattggtttgatttttcgaacctgaatcaatatatattgcattggaatgtaacagccgataatggtatggtactggcgaaaggaatgcaggaggtggattgtttgcctcatggaatggtcaatgtgatgtttggagcagtcaaactgccggttaatacgcgtgaagcctatctgaatttgagttggatgcggaaaacagtttctcctatagtagatacttcctgggaggtagcttatgaccaatttgtattacccggtaatgcaaccggaaaggcttatctgccggaaacatccggcaaaatgacttttacggtggacgaaaagagcggtgctttacaattgcttgcacaggatgggacagaattgctggcaagtccggttacattgagcttgttccgtccggcaacggataatgacaatcgcgaccggaaagcggcacatttatggcgtcaggcgggacttgacaagacggtgcagaaagttgtttctttgaaaaaaggcaaggcttctgctactgcggtagtggagttgctgaatgaggcagggaagaaggtgggcgacgctattttggcatactcattggcgcagaacggaggtgtcaggatacaaaccgaatttacgcccgatactacgatggttaaatcaatggcccgcatgggattggcattcgagatgaacgataggtatgggaatgtttcttatctggggcgcggagagcatgaaacgtatgccgaccgtaagcagtccggtaagattgacatatacaatacgactgttgaacgtatgttccattattatgtaaagccgcaggctacaggtaatcgtaccgatgtacgttggatgaagttggcggatgaagccaataacggattgtttgtcaattcgagccgtccgtttcagtttagtatttctcctttctcggatgagaatattgaaaaggctacccacattaacgaactcgaacgtaatggcaaggtaaccgtgcatctggatgccggacagtcgggagtgggcaccgctacttgcggacctgccacattaccgccttatcttattcctatagacaggcaacagtttgattttaccatctatcttgtcagatgagtgcaaacttatttgaattttgctcatagcaagaggtattgagttaactattaatagaatatatatatgaaacaaataatgctcctgacatcattacttttcgcagtcttttgtggagtgcaggcacaggaaacctattacgagaaacatttgatcttccccgaaaaggctactgctgcacagaagctggacatggcttcacgtttaattcctactccgcaacagttggagtggcagcaaatggagtttaccgctttcctgcatttcggtatcaatacctttacgggacgtgaatggggggatggtacggaagcccctgctctctttaatcctaccgaactggattgtgagcagtgggtacgtgcactcaaagacggaggttttaagatggcaatcattaccgccaagcatcacgacggtttttgtctgtggcctacgaagactacccggcactctgttgcatccagtccctggcgtggcgggaagggagacttggtacgcgaattgcgtaatgcatgcgataaatacggtattaagtttggcatatacctctctccgtgggatcggaatgccgcttgttacggcgattctcccgtctataaccaattcttcattgaacaactcacggagttgctgacgcaatatggtgaaattcacgaagtatggtttgatggtgcaaacggtgaaggacccaacggtaaaaagcaagaatatgactgggatgcagtgataaagaccattcgtcgcctgcagcccaaagctgtgactgctatcatgggtgatgatgtgcgttgggtaggtaatgaaaagggaatcggacgtgaaaccgagtggagtgccacagcattgccgccgggcatctattcccgttcggaagaactgagaaagggattgggtatttatggtaaggccaaagacttgggcggtcgtgacatcgtggcgcgtgccaaggaacttttctggtggccgtccgaagtggatgtgtctattcgtccgggttggttctatcatgctgcacaggacaagcaagtgaagtcgttggcgcatctggtggatatttatttcaaatctgtaggttataattcggtattgttgcttaatattccgcctgataagcgcgggttgattcatgagaatgatgtgcagcgtctgaaagagctttccggttatctgaagaagacgttcggcaaagattttctgcagaaaggagatacccgttggcaatccttaagtggagatgtccgcgaatataaagtgcagaaaggcgctgtggtaaataccttccttattcaggaagatattgccaaaggacagcgtgtggaaaattttcttgtggaggcttactccaatggttcgtggagatatgtggcggaaggtacgacggttgggtacaaacgtctgatccgtttctcggataccaaggcggagaaaatacgggttactgtccgttcggcacgtggaaaggcaaatatcctgaaagtgggacttttcttcgccgaacctttgaatgacgagaatacggaagtgcagttgagtgatattccggtggatgaatggcgtatagcagacggtgaaccgaatgcgcatcaggctattgacggagaccggagtacggggtggtacaccaactcattgaaaccgttgacggtggatatgggacgcgaagtgcaggttacaggcttcagttatgctccggttacgggtgatgacctggcgggtactatttacaaatatgctttctacatcagtagtgacggcgaggaatggacaaaatgcgatgcagccggtgagttcagcaatattatgcacaatcccgttccttactttgtacgcttcggaaagagttatcgggcacgttacttcaagcttgaaccgcttgccgaaatcaacgggaaagtatctactgctattggcgaggtgggtatccttgctgtgaaaggcatgccgaaagatgatgaaacactggtatacgaccgtcccggtgcaccgttgaagctaaaacccggtgataatcatccgaaagtgaaaggttggcgtttctacaccgctcatgaatttttgaaccgtgatacggaaaataatcttccgaaaggattcattgaacataggggggcacacatgagccgtgccgcacgggtggataatgcacgctgttcggaagtgaacaatggtgtgttacagattcgtacagttgaggaaaccgattctttggacaatcgttttggtgccaatgtgaagttctctcacggctgttatcgcacgtcattgcccggaagcaaggatttctggtgtaactttaccgagaatatgcgtattgagattcgttttaaacgcaatgcttatcaaggtttcaacgatgcactttggtttatggggaacaataaccgtccttggcctaagaatggggaaatagatttattggaaaatccgaaaaagacagtcaataatcgtgcacatttcacattgcactcggagaattattatgccggagtagtaggaggcagcggaagtgttacctcgacaattgacctggccgatatgtcctggtggaatatctactggttggaatggtatcccgaccgcatagtaggaggcgtgaatgggcagacctattttgaacaccgtaagggagccaatggcaatgaagattggccttggagtgatccggaaggcttctttcttattttcagtaccggtatatcaaccaatcctaaggcatggcccggggcggttatgccgtccgaatggaaaaaagatgctatgccggccatgttcgttgactggatacgggtgtatgtgaataaagattataaaggtgggaaagctcctgccataaggttctattgatataggtacgtgaaatgaaatatacagttgcttccttaacagttgtagcattgctgtcgggtaatgctatggcacagcgtaaacctaatatcatcctttttttggtggatgatatggggtggcaggatacctctctgcctttttggaaagataccacggacttgaaccgtatttatgaaactcccaatatggagcgtttagctgaaaggggagttatgtttactcacgcttatgcctgttcaatcagttctccgtcacgtgtaagtttgttcactggtgcaaatgctgcgcagcataaagttacaaactggacgttgaagaaagatacgccgaccgataggaaagatgctgtcttggaatttgaagcatggaattataatggtctttgtccggaagcgggattggaacattctttttatgcgaagtgtttgcctcaactacttcgtgagaatggatatgctactatgatggttggaaaagcgcattttggttcgatgggtacacctgcggccaatcctttgacaataggtttcgattataatattgccggtcatgctgccggagctatggggagctatctgggcgaggaaggatatggcgccaagagcgatccggaacgtgcagcagtgtgggctgttccggatttagagcaatatcatggtactgatactttcttgactgaagctttgacattggaggcgaaaagcttattagataaggtaaccggacagtctaagccgttctttctttatatgagccattatgctgtacatgcgcctttcggaacagacagacgtttctaccagaagtacgcagataagggactttcacataaagaagcacagtatgcggcacttttggagggtatggataaaagtttaggcgatttaatggattatgtggacgaaaaaggtatagccgataatacggttattatttttatgtcggataacggcggttatacaatcggtcgtcatgataagaattatccgctgagtgaaggtaaaggttctttaaaggaaggtggaatccgtgagccgatgattgtttgttatccacatgttgccaaaccttctaccataaatgacactcccgttattattgaagatttttttcctacgttgttggaaattgccggagtctgcgattatcggacacctcaacatattgatgggataagctttttgaagcaaataaaaggacatgccggagataaagagcgtgctttgttttttcattatcccaataactggggtgagagaagacagacgatcggtgcaccgcaaagtgcggtcgtggcgggtgattggaaactaatccattactatgaatcgggtagtgcctgcctttataatttggagaatgatatttcggagaatgatgatttgtctgccaggtatccggataaagccaaagaactggctaagatattgagcgattatttaaagtctcaacatgctactatgcctattctgaagctaaccggcaggatagttccgtatcctgatggtagcataagataataaaagagaaaagggctttcggtaacggactgcccttttctctttgctactatatttaaaacttatgttatctattgaaaaaggaaagaagtgttttctttttcttgactaaacaaaatctttcagttcttgttgtagtttttggcgggtaaagaagatacggctctttacagttcccagcgggagtcccagcttctcggctatttcgcggtatttaaaaccggaaacatgcatggagaacggtactttgtattcgcgtggcagtgaattgacgatacggtgcatctctttcaggtcgtatgcgctttctgtgttctcgaatgctgtgtcgcgcggcaggttcaggtggtaaagattgtccgtctggtccacaaatgtctggtcgcgcactactttacgataattgttaataaagatgttgcgcatgatcgtatatatccaacctttgaaattagtatcgggcatgtatttatcttcattatccaaagccttgagtgatgtttcttgaagaaggtcgttggcttcttcgcggtcggaggtgagcttgtacgcaaagcgtaataaatcgttttgaactccgatcagatcttttttaaatgtcatactattcataaatgtgctttgttaaatggttacttgttcgttttgccttttagcattgcaagtttacgaaagttccggcttttcgacaggctgtttttaagcaatctttggggtgaaaactatcaattgatagattttgggtgctatttgatagattttgggtgcagttttctatcgaatatttgcatttaattaaaaagatgcgttaattttgcgcaatcatttcatcacaaaaagaatggctgacgactctttatttttgattgacattgataagattcttcgggagaaagctccgaagcatgtgaagtatatccctaagtttgtcgtatcttatttgaagcgcattgttcatcaggatgaattgaatgtttttctgagagaatcgaaagataaagtgggggtggaattcctgcaggcttgtctggactttctggatgccaaattgatagtgaagggcaaggagaatctgcgaaaagacggtctttatacattcgtttccaatcatcccttaggcggacaggatggagtggcgttgggttatgtacttgggagtttttacgatggaaaggtgaaatatatggtaaatgacctgcttatgaacctgcatggactggctcctctttgtattcctatcaataagaccggcaagcaggccaaggactttccgaaaatggtagaggccggatttgcatcggacgatcagctcattatgtttcctgccgggctttgctcgcgtcgccggaatggggttatccgcgatttggactggaaaaagacgtttatagtaaagagcgttgaagcgcaccgcgatgtagtacctattcattttgacggccgtaactccgattttttctataatctggcaaatctttgcaaaacgttgggtatcaagtttaatatagccatgttgtatctggcagatgaaatgttgaaaaaccgtcataaaacatttaccattactataggtaagcctattccctggcaaacattcgataagacgaaaacacctgcccaatgggcgcagtatgtgaaagatatcgtgtataaattgtaagttgaacattgaatataaaaaaatagaagctcggaagatggaagatattattgcaccgataagcaaagaactgctgaaagcggagttgaccgaagacaaacgcttgcgcatgacgaataagagtaataatcagatatatattattactgcccaggattcacccaatacgatgaaggaaatcggacgtctgcgtgagattgcatttcgtgctgccggtggcggaacaggaatgtccatggatattgatgagtacgatattatggataatccttataagcagttgatagtctggaatccggaagaggaagagatattaggcggttaccgctatattctcggtacggatgtacgcttcgacgagcacggcgctccgattttggctactgcgcacatgtttaatttttccgagaaattcttgaatgaatatcttcctactaccattgagcttggacgttcattcgtgacgctcgaataccagtctacccgtcgcgacagcaaaggtttgttcgcattggataatttgtgggacggcttgggtgcgttgacggtggttatgcccaacgtgaagtatttcttcggaaaggttaccatgtatcccagttatatccgtaaaggacgcgacatgattctttatttcctgagaaagcattttgccgataaagacagtctgattactccgatgaaaccgctgcaattggagtcggatgaggaagaactggctgcattgttctgtaaggatacatttaaggaagactataaaatattgaatggcgaaatccgtaagctgggatacaatattccgccgttggtaaatgcctacatgagtctcagtccgacaatgcgtatgttcggtacggccattaattacggtttcggtgatgtggaagaaacaggtatcctgattgccgtcgatgaaatcctggcggaaaagcgcatccgccatatccagtcattcatcgaaagcgagccggaagcatgcaaactgacttccggggcgaataagatattctatccgagcagataaatcatacagccggcaggctgtttccgttgattttccggtagaggtcgagggcgaatacatccgtcatgccggatatgtagtccaatacggcctgtatcctttcatacagtgcagttgctttcatattatattgtccggatacccggttgatgagcaactgcgaatatgctttttccggtgagcgtactgcatcgatcatcagttcgagcaaggtgctgatgatacggaaaccggcaagttctatgtccaatacatcgcgcgaacggtatatcttcttgaaagatacctctgcgcaatgttggtaggccgcggcaggccgttcggtgatatgcttgatgagacttccctcaaattccccttccagtatctgtacttcgttatcgaggaatgcccgggtgcattcgccgataagcagcccgatgacggaagaacgcagataggctatctgttcattggtgtcgctcacaatcttgagcgtgtcgaggatgtgcgccttacgttcgtcgggaaagtaggccagcagcaggtcctgcgtttcctgcgtagtgagaatcttcagtttgtgggcatcttcaatatccatcatctggtagcagatgtcatctgccgcttctaccaggtagacaagcgggtgacgtgcgtatttcaaaggtgaaccgttaagctgtttcatccccagttcttcggctattcgccggaaactttcttcttcggtagtaaagaagccgaatttggatttctgtcctgccaggctcgatgaaaaggggtattttacgatgctggcaagtgtggaataggtcaggacgaaaccgcctttgcggcgtccttcaaactgatgggtaagcagacggaaagcatttgcgtttccttcgaaatgagtcaggtcttcccattgtgccggggtgagttgttctccgtcgggttgtttttctttcaatgccagcccttttccttccgaaaagaaagtagagatggcgcgttcgccggaatgtccgaatggcggattgcccaaatcgtgcgccagacatgctgcggaaacaatggagccgatttcgggcagataagagtcttgcagttcggggcggcgggcaaggatggctttggctacgtcattgcccagtgaacggcctacgcaggaaacttccagactatgtgtcagccggttgtgtacgaatatgctgccgggcagagggaacacttgtgtcttgttctgcaatctccggaaaggtgcggagaagatgaggcggtcgtaatcccgctgaaattcagaacggttctcgtgacgctctttatgaaactcttccaagccgaatcgtttggcggatatgagggtattccagtccatcatgttcttactttcttattatttaactgcaaatgtatgactatttgcttcaaaatccgtaattttgtccgttaaatagtgaattaaagtaatctcaatcgtaacttcattgaaatggcaaataatagtatgaccgtccgaattataaataagtcgaaacatccgttgcctgcatacgccaccgagttgtctgccggaatggacatccgtgccaatctttccgagccgatagctttggaaccgttgcagcgttgcctggttcctacaggtttgtacatcgctttgccggctgggtttgaggcacagattcgtccccgcagcggtttggctatcaagaaaggtatctcggtattgaactctccgggtactatcgatgcagactatcgcggtgaaatctgtattatcctcgtaaatctttcttcggaaacatttatgattgaggacggagaacgaatcgcccaaatggtaattgcccgccatgagcaggccgtatggcaggaggtgaatgtgttggatgaaacggaacgcggtgccggtggcttcggacatacgggcgtgtagttgggatggggtatgagtgattagcgatgagtgattagtgattgacggagggttgcttataccatttgattttatatagataatgagcatattcgataataagaaaatagggctgtttttgttggtggcgggcttcttgcttgtctcctgcgggacatcccgtaagcaggcaaaggcattatcggcgaagcctgtggcggaacttactccggaacagcagcgtaagtatgattacttctttttggaagcagcccgtctgaagattcagaaagactatgatgcggcttttgatttgctgcagcattgcctgactatcaatccgaatgcttcgtcggccttatacgaactggcgcaatattatttgttcctgaagcaagtgcctcaggggcaggctgcattggagaaggccgtggaaaacgatccggataattattggtacagtcagggactggcgaatctttatcagcaacaggacgaaaaggagaaagcgatgaagctgctggaagatatgtccatacgtttcaccgacaagctggatccgctttatgccttgttggacatttataatcggcaggagcagtatgataaggtgattgctactttgaaccggattgaggagaagatgggcaaaagcgagcagttgagtatggagaagttccgtatttatctgcaaatgaaagacaataagaatgctttccatgagatagagagcctggttgcggagtatccgatggattcccgttatcaggttgtgttaggggatgtatatatgcagaacggaaagaaagaggaagcatataacatgtaccgcaaggtgttggatgccgagccggataatgccatggcgatgtattcgctggcgtcctattatgaggagaccggtcagaaagacctttatcagcagcagttggacactttattgctcaacaagaaagttccttcggaaacgaaactgaatgtaatgcgccagtttgtcgtgcagaatgagcaggacggtaaggacagtacgcgggttatcagccttttcgaccgtattctggaacaagagccggatgatgccgggataccgatgctttacgctcagtatcttttatccaaaggaatgaacaaggaagcctttccggtactgcgtcaggtgttggcaatcgatcctaccaatacggctgcgcgtatgatgttgctgggtgaagcggtacgcaaggaggattacaacgatgtgattgatttatgcgaagccggcgttgaaaccaacccggagatgctggagttctatttctatctggctatcgcttataaccaggcggaacggacggatgatgtaatttccatttgtcagaaagcattgacgcaaattacagcggacagtaagaaagaggttgtttcggatttctattccattttgggagacgcctatcatacgaaagatttgaatacggaagcctatgctgcctatgattcggcgctggtgtacaatccttccaatatcggagctttgaacaattatgcttattacctatctgtcgagcgccgtaatctggataaagccgaggagatgagttataagacggtgaaggcggaatccgataatgctacctatttggacacttatgcctggattctgtttgagaaaggcaattatgccgaggcccgtttgtatatagacgatgccatgaaaagtgacggaggcaaaagcgatgtcatcgtagaacattgcggcgacatctactatatgacgggtgatgtggacaaggctctggagtattggaaccaggcattgaagataggcagtaagtccaagaccctacaggagaagattcggaagaagaagtatatcagtgataagtaagtcggtaaaacggtgaagtgatacataataaaagtaacaaggtaatggaacaaacaaaattcaatggcaggactctggtctttatgctctttatcctctgctgtctggcaggctgtaaaaccacccggaaggcggagacatccaaatttcccgaaagtacccgctacctgtcttccaaggtgcggctgaccgttcctaccaaagacgccgttttcaccgtaaacggtacgatgaagctgataagcggcgaacggatgcagctttctttcctcatgcctatcatacgtacagaggtggcgcgcatggaagtgacgcccgaagaaatattgctggtagaccgcatgggcaagcgttacgtccgtgctacccgtaaggaattgaaagatgtgctaccgaagaaagccgactttgctcatttggaaaagattctattcaatgcttccaaacccaacggaaagaaagagttgtcgggaaaggaattgggcattccttcgctggagaaaggcagaatcgagttgtccggcttttccaataattcgttttcgctgacgcctaccgagctgtcttcaaagtacacacaagttgagttgaatgaaatattagaaatgctgatgagcttatgagacgtttgctttgtatttttataggttgtttctgtctggcttttccgcttcttgcccagtccaacaaactgataaaggaattggaaagcaagcgcggtgctttgcaaaagcagattaccgaatcggaaacacttctgaaaactacaaagaaaaccgtaagcagccagttgaacggacttgccgctttgacggggcagatagaggaacgcaaacgctatatccttaccataaataacgatgtagagtcgatagatcgtgagctatcgtcattggaacgccagttaggaaaattgcagcgcgacttgaaggacaagaagaagaaatacgagtcgtctgtccagtacctttataagaaccgttccattgaggagaagctgatgtttattttctctgcgcggagtctggcgcagacctatcgccgcttgcgttatgtgcgtgagtatgccacctaccaacgcctgcagggcgaggaagtgctgaaaaagcaggaacaggtcaataagaagaaagcggaactcaggcaggtgcgggctgccaaagccaatctgctgaaagagcgcgaggccgagaaagtaaaactggaagcgcaggagaaagaaaagcgtatccttgtggccgatttacggaagaagcaacgcggattacagaacgagattgccaagaagcggcgcgaggccagccaacttaatgcgcgtatcgaccgcttgattgccgaagaaatagagaaagcccgcaaacgtgccgcagaggaagcacgccgtgaagcggctgcccgcaagaaagaagcggctaaagcggctaagtcgggaacgtccgcttccggaaaaaaggttgctcctttggaaacttataccatgagtaaggccgaccgagagctgtccggtgactttgccaataaccgcggcaagctgcctatgcctatcagcggagcctatatcataaccagccattacgggcaatatgccgtggagggattacgcaatgtcaagttggacaataaaggtatcgacatccagggaaaaccgggagcgcaggcgcgtgccatcttcaacggcaaggtggcggccgtattcaaactgaacgggctgtttaatatccttatccgtcatggagcctatatttccgtatattgcaacctggcttccgcttcggtgaaacaaggcgacacggtcactaccaagcaagctatcggccaggtattctcggatggggcggacggcggacgtacggtacttcatttccagctacgccgtgaaaaggagaagctgaatcccgaaccctggctgaacagataaatcttatattgttgctccgtccagcaggtccagataaagtgcaatagcctcttcaatctctttgacgaagataaactcatccgcagtatgggagcggctgctcttgcccggtcctattttcatggacgggaaagacatcagtgcctggtctgaaagggtaggcgaaccgaaaggagtccgacccatcgcaacggccttttttaccagcgggtgttcgggagaaacatgcgaagaacccaagcggaaagaacgcgctttggcttcacaggcgatgtgtttccgtatctcgtcgaaaagttcctggttggtgtaacattcgttactgcggatgtcgactacgaatgtgcagcggtcgggtattacattgtgctgtgtccctgcattcaccatggttacactcatttttaccggtcccaataaagccgattctttcgggaaacggtaatcgcggaaccaggcaatgtcgttcagcaccttgtatatggcgttgtcgccttcgttccgggcagcatgccccgacctgccgtaggcggtgacatccagtaccatcagccctttttcggcaatggcgggttgcatctccgtgggttcgcccacaatggcgaattgtatgggcggcagctccggtagtacggactctactccttccttgcccgacacctcttcctcgcaggaagccaggtaaatcaggttgtaagcctgtgtagtccggcacaattgcaggaatacctgcagcaggctgactacgcttgctccggcgtcattgcttcccaaaccgtaaatcttgccgttctcttccgtaggggtgaacggggctttccgccatccgtttacgggcttcaccgtgtcgatgtgcgagttcagcagcagcgtaggtttgttcaggtcgaacatcgggctgagacaccatatattgttgcctttccgtccggttgccattccctgcatttcgatgtaattctgaagaaagtccgcggcctgctcctcttcgcggctcaatgatggtatggctatcaatgatttaagcagtccgattgcctcggaaaccagtgtttctatatccgttgtcatcgttgggttctgttatatattcgttattactttgcaaacttacggataaatcccgaaaaagggagatagtttcaaataaaactaatacctttgtacccatatttaccaattcattaaaaatatgacttatcatcatttgtctgttctgatacatcgtcaggcagagaagtatggagacaaagtagcccttaaatacagggactatgaaacatcacaatggatacctatcacttggaataaattctctcggacagtacgtcaggcagccaatgcgttggtggctttaggtgcagaggaacagaggaacatcggtatcttctcacaaaacaagccggaatgtttatttaccgattttgctgcctttgccaaccgtctggttaccataccgctgtatgctaccagctcttcggctcaggcccagtatattatcaacgatgctcagatacgtttcctctttgtgggcgagcaattccagtatgatgccgctttcagcgcattcggcttttgccactctctggagaaactgattattttcgaccgcagcgttgtgcgcgatccccgcgacaagacctctatctactacgacgagtttctggcattgggcgaggggctaccccacaatgccgttgtggaagagcgtaccgcccgtgcatcggacagcgaccttgccaatattctttatacatccggtaccaccggcgagccgaaaggagtgatgctgcaccacttcaactacagagaggctatccgcatccatgatatccgcctgactgccatgacggataaggatgtgtccatgaacttccttccgttgacgcatgtgtttgaaaaagcatggacttatttctgtcttcacagaggtgtgcaggtttgcgtcaatcttcgtccggcagatattcagaccactatcaaggagatacgtcctacattgatgtgcagcgttccccgcttttgggagaaggtatatgccggtgtgcaggagaagattgcccaagagagcggcctgcggaaagcaatgatgctggatgctcttaaagtagggaagatgcacaacattgattacctgcgtgcaggcaaaacgccgcccctgatgcttcatctgaagtataaattctatgaaaagactatctatgccctgctgaaaaagacaatcggtattgagaacggtaattttttcccgactgccggtgctgccgtatccgatgaaatctgcgaattcgtgcactcggtgggcatcaatatggtggtgggttatggattgacggaatctacggctaccgtgtcctgcttcctcgacaaggggtatgagataggttcggtaggtactgtcatgcccgaccttgaagtgaagattggagaaaacaatgaaatcctgcttcgcggtaagactattactaccggctattataagaaaccggaagccaccgctgcggctatcgacaaagatggctggttccatacgggtgatgccggctatctgaaaggaaatcatttgtatctgaccgaacgtatcaaggatttgttcaagacctcgaacggaaagtatatctctccgcaggctctggaaaccaaactgtcgatagaccgttacattgaccagattgctgtcattgccgaccagcgtaagtttgtgtctgccctgattgttccggtttatggcttggtgaagaactatgccaaggagaaaggccttgagtacaaggatatggccgacttgttgcagcatcctaaagtgcaggctttgttccgtgcccgcattgatacgttgcaacagcagtttgcgcattatgagcaggtgaaacgtttcactttattgtccgaaccgttcagcatggaacggggcgagctgacaaatacattgaagctgaaacgctctgtggtggcgaagaattataaggagctgattgataagatgtacgaagaataaaagtccggatgactttagagtttgcttaaaataggaaaaaaggaggcggtatgcctccttttttattgtcggatatgccgtcaacggtttaggcttatatgtttacaaatggaacggtatgattctttcttcttttccgctccgttgaatgaactctatcaagtcagggactgaatgcctttcactcagagactcattgttcccctgttcagaagtctttgtgagcggggagggagaaaagaggaaaaagttggaagtcgggataaaaaatgtgtatttcttcttagggttgcgccggtgtggtctgtttatattctatggaaagatatttttaatcttaaaacttagtatgctatgagaaagcttttatcggcgctgatattgtcgttttcaatatggagcgttttttcatgccggcaggaaaataatgtaaccgttaagcagtatcccatgttctggacatggctggattatcgtcccggcatgaatttcgattcggtatgccaggtgatgaatgacatcggcatggatggaataatgctgaatgcacctacccccgacgactatcgcattgccattcccatagcccgtaaacacggcattgaagtatacgcatggttgtggaccatgaatctggagcacgaccgcgataagattttggcagaacatcccgactggttcagcgtaaaccgcaacggaaagagcctcgcagatactacggcatatgtggattattataaattcctctgtcccgcactgcctgaggtgcgcgaattcatcagggagaaaattaagtcgtattgcgaagtcgagggattgaacggaattgccatcgactacaaccgtttggtggatgtagtgcttcctaccacgttatggccgcattacggtattgtgcaagaccgggaatatgccgcatgggattacggttatcatcccgccatgctcgaaaagttcaagagcaggtatggctatgatccgcgtgagcagcaggacccttcggcagacataaagtggcggcagttccgttgcgaccagataacggaagttgcgaatatgattgccggagtggtgcattcgtatggcaagacaatggcggcatctccgtttcctacgccgaaaatggcttcacgcatggtgcggcaggactggggtaaatggaacctggatatcgtttttccgatggtttaccatactttctatacggaagatgtcagttttatttccgattgtaccgttgagaatgtgcgcgacaagaatgataaaaccgtattgtattgcggcatgaccgctaccgatggtccggaaatgttcgaatgtatggatgccgcgctgaatagcggtgctcagggcattgccgtatttacggtggcaggcttgcgctcatctgaggtaaagaaccggttcaaaacttatacggacagcgtacgggcggtgcgcgcggctaatggcggtatcattgaagcggtgcatcctcacgtggcggataccaatccttttactcataaaggcatcatggcgttggtggaaaaacgtatgcgacggattgtggccgaagcatccggtaaagaggtgttacccccgttggctttgggtgagtataagcaaacggaatcttacgatgccacccgttgctatcgggtgtcggatgagaacagcaggacggtctttaaggttactttctacttctacggtgatgtactttcgggttgggacgtagtggcggaatagcccgccctctttcttattccgttgattgcagcggatttatgcgattttttcagacttttgcactatctttgcggtttaaaaagatagaatttgaagaaagtatatgattaccattgaacaactgaaagatatcaaggaacgtaccgaagcgttgaaccgctatctggacatcgaaggaaaaaaaatacaagtggaagaggagcaattgcgcacgcaggctccgggtttctgggatgaccagaaagccgccgaagctcagatgaagaaagtgaaaggcttgcagcaatggatttccggctacaatgaagtcaaggttatggcggatgagttgcagcttgcattcgatttctacaaggatgaactggtaacggaagaggaagtggatgaggcctatgcaaaggcatccgctgccgtagaggcccttgagctcaagaatatgcttcgtgaggaagccgaccagatggattgtgtactgaaaataaattcgggagccggcggcacggagagccaggactgggcgagcatgctgatgcgtatgtatctgcgatatgccgaaacacacggatataaggcaactatttccaacttgcaggaaggcgacgaggctggaatcaagacctgtaccattgaaatatcgggcgattatgcctacggctatctgaaaggcgagaacggtgtccaccgtttggtgcgcgtatctccctataatgctcagggcaagcgtatgacttctttcgcatccgttttcgtcactccgctggtggacgatacgattgaggtgaacatcgaacaggcgcgcatctcgtgggatactttccgttccagcggtgcgggcggacagaacgtaaataaggtggagtccggcgtgcgtttgcgctatcagttcaaagacccttacactggcgaggaagaggaaattctgattgagaataccgaaacgcgcgaccagcccaagaaccgggagaatgcaatgcgtcagttgcgttccattctgtacgacaaggaacttcagcatcgtatggcggaacaggcaaaggtggaagccggcaagaagaagattgagtggggttcgcaaatccgcagttacgtgttcgacgaccgccgcgtgaaagaccaccgtaccaatttccagacttcggatgtaaacggggtaatggacggtaagatagacggtttcgtcaaggcctacctgatggaatttgcaggcggagataacatttagtcctttctgctttcctttctataggcacgggattgcacggatttcgcagatttgctttattctttttcggtgaactccgtgtaatcccgtgtctgataaagaaacaaataacaaacgtttttttgttttgacacattcctttcttttttcttttataaatgcttgcaaacttcccgaatttccttttactttgtttatcgttgaactttaaactatagaaacaccatgggaaagagtaaaaagaaagtaatgcacagccggaaagaagaacaacaagccaggaaagtattgctgattatcggagttgccgctttggtattggtagttgccatgctggtgggctattccttcttaggctgattcagaagataaatatgccgcaagagatagaacggaaatttctcgtaaaaggagaatacaagtcgcaagcatactcgcaggaccgtatcattcagggatatatcagcagtgcgcgcggacggacggtgcgggtacgcatacgtggcgggcaggggtatctcaccattaagggagcatccgatgcatccggtatcagccgttacgaatgggaaaaagaaattcctctgaatgaagccgaggagctgatgaaactgtgtgagccgggtgttattgataaaacccgttacctgatacgcagcggaaaccatgtttttgaggtagatgagttctacggtgagaatgagggactggtagttgccgaagtggagcttgcctcggagaacgagccttttgagaagccggactttatcgggcaggaagtgacgggagatatccgttattacaattcgcaactgatgaaacatccgttcaaggaatggaagtaaactaattacgccccgtaattgttgattcgtatatggagaaactgtaccaatacctgccggaagaactcgtcacttttatcctggtgacggtgttttctttgcttataggtctttccttgaggcgtatcagtctgaagcgcgaaggagagacgaccttgttcggtacggaccgtactttcacctttatcggcattctgggctatctcctctatattctcgacccgacggactatcgcctgtttatgggtggcggggctgtcctggggttgctgcttgccttgaattattacgtcaagcaggctcagtttcatgtgttcggggtcactaccattatcattgcgctcattacgtattgcattgcacctatcgttgctacgcagccctcctggttctatgtaatggtaattgtgaccgtattgctctttaccgagctgaaacatacgtttaccgaactggcacagcggatgaagaacgacgaaatgattacgcttgccaagttccttgccatcagcggtatcatcctcccgatgctgcccgacgacaatctgataccgggcatcaacctcacgccttacagtatatggctggctacggtggtggtttcgggcatctcctatctttcttatctgctgaaaagatatgtattccgtgagtccggtattttggtatccggcattgtaggcgggttgtacagcagcactgccaccatatccgtactggcgcgcaaaagtcggaaagtatccgcccaggaagcacccgaatatgtggcggcgatgctgttggcggtcagcatgatgttcttgcggtttcttatcctgataggaatattcagtgtaggggctttgacagccatttatccgtatttgctgataatgtctgccgttgctgctgggacggcgtggttcctgcattcccggtggaagcgtcctgctatgtcggaaacggtcgatgaagacgaggacggcagcaatccgctggagttcaaggtagcgcttatttttgccgtgctttttgtggtatttacaatcgctacccattatacgttgatatacgccggcgagggcgggttgactctgctctcctttgtttccggcttcagcgacatcactccgttcatcttgaatcttctgcagggtacgggcaatgtgcctgtttcattgataacggcttgcagcatgcaggcgatagtaagcaacattgccgtaaatatgtgttatgcattgttcttctccggcaagaagagtccgttgcgttcgtgggtgttgagaggcttcggttgtgtcattgccgccaatgtgctcctgctgctgtttttctactttctgtaaatcaatgtgcttctgcaaaagtgaaagaatgtacgcttacatttttctaaatgctttgttgtaagttatccgtttgtttttccaaaaagaaactatactatagttttatgagaatataatataccttttttgttttgtatattattgattatcataatattaaataaaacatgtaaggaggtatgtgttcttttctttgggagactttttttctactaaatacacttctttaaaacatgttttagagcatgtgtacacttatttgagaatatagtaaacgctttctacttgtctgtcgtatacttttgctcacaaattaataattaatcagaaatactatggatatagcaaaaagatgtgagcagaaccctttgcttgcgcccaaaaatttgaaagcaggcatagatggaatggaaataacatgtttgttaaaccctggagttttcaggtatcaagacaaaatatggctacttttgcgcattgcagaacgacctatacaaaaagaaggtattattagttttcctatatataataaagaaggtaaaatagaggttgtttctttttcaaaggatagtcctgatttgaatgcgtcagatcctcgggtaatcagttataagggtaaggattatttaacaacaatgtcatatctaagattggtttcgagcactgatggcattcacttcaaggatgaaccagagtttccaccaatttttggaaaaggtgaattagagacatttggtattgaagattgtcgtgttgctacaacagaagatggtttttaccttacttttacggaggtatcacctgtggcagtaggggtgggattaattcatactaaagattggaagaactatgtgagatatggaatgatatttccgccacataataaggattgtgctctgtttgaacaaaaaataggtggtcgatactttgcttttcatcgcccaagcagtccagagcttggtggtaattatatttggttggcagaatctcctgatcgtctgcattggggaaaccacaaatgtgtggcagtaactcgtgaaggaatgtgggattgtgctcgtataggtgctggtgcggctcctatcaagactgatagaggttggttggaaatttatcatggagccgatttcaatcaccgttattgtttaggagctttgctccttgatttagaagatccttcaaaagtaattgcaagaagtgaagatcctatcatggaacctattgctccttatgaacagactggtttttttggaaatgttgtttttacaaatggacattatgtagatggtgatagaataacaatgtattacggagcaagtgacgaagttatttgtaaggcggagttctctattaaagaaatcttgaatacgctaaaatagaatgatatagatgatggataaattgaggaaagaatatttattctttaagcaacaagaacctaacatgaaaatattgctgttaaccaatatgctttatgcattggtgttaccggtagttgaaatttttgtgggagcttatataatgagaaatactagtgatccggttatggttgccttttatcagttagctatgtatgcgggtattgttgctacttcttttgtgaatggttttttactgaagaaatacaatgtaaaaattctctattcggcaggaatattggtaagtggtattgcaatgttcggaatgatgactattaagtcgcttggatttatcgaacttggtttggcgggctttttaatgggggcggcttcaggctttttttggacgaaccgttatttattggctctttataatactaatgatgataatcgtaactatttttttggattggagtctttctttttctctattacctctattggcgtacctttggctatcggtgcatttattagtcagataggtggaaaagaaattttgggttttatgtttaatatcagtgattcctaccgtatggtaacgatgggagtagtggttattactattattgcttgtttagtgctatggcgagggaattttaataatccgaaagaaaccaactttctttatttccgatttaatatcctttggaaaaagatgctttggttggctgctttgaaaggtatggttcaggggttcttggtaacggctccggctatattggtccttaagttagtaggtgatgaaggggctttaggtttgatacaaggtatcagtggggcgctgacagcaattttggtttatatattaggacgcatagctcatccgaaagaccgtttgaagatatttgtaggtgggttaatactcttttttattggcaccctgtggaatggcattcttttttcggttgtaggagttattatttttgttctttgtaaggtggtttttcagcctttgtttgatttagcttatttccctattatgatgagaaccattgatgttgttgcaaagattgagcatagaaatgaatatgcatatatcttgagccatgaattcggactgtttttgggaagggcgtttggattactgttatttatatttctttcatatagcatttcacaggattttgctctgaagtatgcattgattattgttgcaggattgcagttaatagcataccctttagctaaaaatattattaaccaaactaatattatcgaacatgaaaatgataagtaaaagtttttatacctttattattgttggcctattggtctcttgctctagtggaaaagataacttcggagagaagattgtgcaggtttctattaatagagtagactctatgcctgatattccggaaacttataagatgttagattggcgacagaaagcaaaagattatgaccgcttcattttcgattggaacaataagagtgaagtcggtccattgatttggttggatgatgcccgtcggaatattgatcagactacttttggtttatatacagctattaaagatatccgacaggggaaagatgcaaataatggagagtttcatgaaagtttgaattcattggctgctattttaggtgccggtttggtaggcattgataaaaccaatcaggatggatacaattatgtaaagatggttcaaaactacttcaattcggataatggatggaatataatgatgaacaacacgaatccggcagtcgctaacttgggtggtggctatggacgtgactggtggtatgatgtacttcctaacgctttgtattatgctgtatgtgacgtatttccaaatgtagatggagctgagaggatacaaagaagcattgctgaacagtttgtaaaagcagattctgtattaaatggaaattatgactattcatactttgattataaaaatttaaaaggctatgttaatcatattcccatgcagcaggatgcagcaggtggacatgcctatgtgcttttatgtgcttatcataaatttggtgatccacgctatttggaacattgtaagagtgccttggaagcactaatttctcagaaagaaagccgtttttatgaagctcttttgcctttaggtgtatatgttgcagcttatttaaatgctacagaagggacaaattataatgtatctaaactctttgattgggtgtttgatggctgtcaaagttcttctggacgtactggctggggaattatagtaggaaagtggggagattatgatgtaagtggattacaagggagtataacagatggtggtggatatgcgttccttatgaatagtatcaaaccggcatggcctttcattccattagttaagtaccaacccgaatatgcaaaagctatcggtaagtggatgctaaacaactcaagtgcatgccgtctgttttatccgggtgatattgatgaaaagcatcaatgggctccggaactgaaaaatattacaaataacaatgtgtcgtatgaaggcctgagaaaggcggatgattatggtaaggaatctttgaaaggggttagtccggttgcgattggcgatggtcctaaatggatagaaggtaaccctgctgaaagtatgtttagcgtatatagctcttctccggttggtattttgggagcaattataacaaaaaccgatgtagaaggtattcttcagttggattgtaatgctactgatttttatgtggataagccttatccggtttacctttattataatccctataaagaggctaaaactattacttatcgggcatcacaagaatgtgacctgtttgatattgttgcaaaaaagtatgttgctagaaatgtgaatgaaagtggcttgattgagattccggctaatgatgcaagagttatcgtagaacttcctcaaggtacggtattggagctacaagatggtaagattattgccaataaagagaatataattgcatataaataaaacctattgtaaaactaataattgaagtattatgaaatttaatttgttttcgagtaaatctagggtacggcaattttgcctgactatgctttgcttgtttttattccagggagtcattgcccaaaataaaatgttggttggaaccgttgtagatgaacttggagagactttgattggagtaagcgtcttgaataaaactacaggagagggaactattactgccatagatggcagctttagcctttcgggtaagcaaaatgatttaattcaattctcttatataggctatgcctctgtggactatgtagttaaacaagaggaaaatatcagagttgtgttgaaagaagatacgcaaaatctagaggaagtggttgttgtggggtattctgcacaaaaaaagtcttctcttacaggagctattgcaccagtgaatatggatgatatggagaagcgtcgggttgccacagtgtctcaagctctccaaggtcaggttgccggtgtgcagataacccaaagtacaggtgcaccgggtgatgacatctccatgttgattcgtggagagggcactatcggtaataatagccctctgtacatcattgacggagtaccatcaagaaccatgacttttttgaatccgtctgatattagctcaattacagtactaaaggatgcttctgcggctgctgtttatggttcacgtgcttctggcggtgtagttgtgattacgactaaagaaggtgaagtgggaaaaggacatttagaactgaattattattatggaatacagaaggttgcgaatctacccaggatgctgaatactcaacaatatatggatgtgcaggaaatagcatggaataatgccggttatgaaggctcaaatccttatactattgataaaaaaaggacagatcttgccgatactgattggttagatgaactatttactttaggacagactcataatattcaagcaactatgagtggaggttcgaaaggtgtaaactatttgctttctgctggatatatttctcaagatggtattgtggtatatgataatgataggtatcgtcgctttagtttgcgctcaaatataaatgcaaagtattatgacagactcaatataggagctaatgtacaattgacttattcaattcaggataaattaaactcaaaaggtgatgcgccgggtattatcagacatgctatgttgcgtccgtcagtgttaagtgtttataaagatgtgaatgatcctacttataaagctaatgatccttttacggacttgcctttttataagaataacgatcgaaacggcggttgggaaagtagcaaatatgaatggacgtctaatcctattgctttagcttattatacagatgataaacgttcgcagtacacaacatttggtaatgtttttgcagaatacgagtttttgcaagatcattctttaaagttcaagactaatttgggtattgatttgaatctttatcacaataaggctttcaatcagaattttggtgacgatgatggcagcggttcggatgtggataaaggtttgggtagacaaaacagaccgagtaaccttgatgaatcacgtggtgaaagtttcacattgacttggaataatacgctaagttatgcaaaacaatttgaaaggcataatattaatgctgtagcgggtactgaatttatttccaattatgaatcatctataggagcttctcggcaacgttatgattatactaatgatactttcagatatcttgattttggtggaacagagtctgatatatggaatagtggctcaggctcagagtgggcattgatgtctgttttcgcctctgctacttatgtatatgataaccgctatatgataactggaaattttcgtgcagatgcttcttcccggtttgcaagtaatcatgcttggggattttttccttcagtgtcggctggatggaaaatgtctgaagaaaagtttctgaaaaatatatcgtggttatcagatttgaagttgagaggtagttggggacagttggggaatcaagagattgataactatacctttatgactttattaaagaaagatggtgataaatatgttatttcccgttatggcaatcccgatttgaaatgggaaacatcagaacagtggaatgttggtgttgatttaggaatattgagaaacaagttatatttgtctgccgactactttatgaaaacaacatcagatatattgttaccaatttcattgccttcttatgtaggtagtgtatctcctacaatagtgaatgctggtactgtgcgtaataaaggttttgaactatcattgacatatagggataaagtgggtgattttaattatagtattaatggcaacattgctactttagacaataaggtactaaaattacatcctaatttgcctaatattgatggcaaggttacccgtacaacagtaggtcagccattgaatgcttattatggttttgtgatggaaggtatttatcaaaatgaggcagaaattaatgaacaactttatgcaacagacaatcctacggtgcagcctggagatattcgtttcaaagatttagataataatggaaagatagatgacaatgaccgcgattttctaggtagcccgattcctaggtttacttacggatttactctgaatggagagtataaagggtttaatttttctatgttgtttcatggagtgcaagatgtgcaacattttaatgatttgaagaaaattttgaattatgatacgcgcccattcaatcatacaacagagatgttgggttactggcatggagaagggacaagtaattcgattcctcgtccaagttttacggacaatgggggaagcagaatatcaagcatatttgtagaggatgcttctttctttagattaaaaaatgttgagctaggctattcttttgcaaaattgctgaagaaaatcaattcacctatatccgatttgaaaatatatgtgtcggcagagaatttgtttaccgtaacttcatactcaggtctggatcctgaatctacggacctaatagattatggaacttatccccaagcaagatcattcttgtttggtgtaaatgttaaattttaaactgttaaagattagactaatgaaaaagatacatataactttgtttagtgtgataagtcttttgtttgtgacaagttgtgatgattatttacataaagatccgataggattattaacaccggataatgtaaatacaaatcctacgcttacaagtgttcaatattcagtaaactctacttatcagatgcttgcgagtactttgaatttgctgggagattgggcatgggatgacggtactgtgactcgtaatgattttgttgtttatgatttagcttcggatgacgctttgaagaaatggaatccagatggcgaccagccttggatggatgaaattcagaactactcatatatagcttctaacactgcattcaacggtttctggagttatcaatatgagggtgtttctagagcaaatttagctttaagctatctgatggatgataaaattatagagactgttgggatggatgcttcattaagaaagcgtttgttgggtgaaacttattttctacgtgccttctattatttcgatcttgttacgaactttggtgatgttccttttttgatagctcctattaaagattttgaggatgcatataaggtatctgagagaacggacaaagaaatagtttgggaacagattatgaatgatttggaagatgcaaaaggaaatttgccacttacgaagttctcatcagaaagtgagccttggagggtctctttgggagctgtcttagcaatgcaggctaaggtggcattatatagaaaggattatctgggagtactaagtgctattaaagaacttgaagataaaggcttttatcgtttgaacagtaattattttgactcatttagccagtatcatgagttcaccgataatgaggttatttttgcttacgatcataaggagaagatgactccggcgcaaggtaacgggttgtgtgctttgctgggttggggcttctttgcaccttctaagagttttattaaggagtttgaaccgaatgacccacgtttgaatttgaccgttgatgttgaaaagcaattggtgtataaaattttgggtgatttatccaataagaaccaaggttatgatgatgccccaagtaataaagtgtatatccgttatgcagatgtgatgttatggaaggccgaagctttgattgaaacaggtaaggtatccgatgctattgatattatcaatgaggtcagagaaagggcaagaaatactgtgggggttgatggggagacgaaagctcctgctggaacattacccgatagagataggcttggttccaaagaacaagcatgggaatggttgatacacgaacgtcgcgtggaacttggattggagtctcatcgctttagagacctgaaacgttggggcattgcaaaggaagtgcttaacgctaatggccaggcttttacggatcgtaactatttgttcccgattcctcaaaaagatatagataagtctggtggcaagttgattcagaatcctggttattaattattcttgaggatgtgttgaatttttagtgttttatcacttgtgagttgctgtttccgatgaaggaaaaattaacaggaattatccggatctgtttttatatttgatttgtatcatctgtttctgaagaatgctccaatgatagctaatttatttttgacacatcctctataatttagatatactatgagtaagcattttatatgccttgtatttttgttggctattttttgtgtgcagggatttgctgacgagatgaagttacatgtgttgggaaataagaaccaaggatattatgtgaatatctattatggttcccaattgataatggagcaaggtaaagccggagagttggatttatattttgataatgaagattactctgtcagagagaccttgaaagggtggaaagcgacttcggtggaacagtcggagcgaaaagtggtactttcaggaaatgtgtatttaaagaagttggaggcagacttgtcggttaatgtgatttatgaggttgttagttcacaattggtcagtaagcgaatagagttacaacagaataatctttctttattatattattcagttggtacatccataactgctgccgacaagccttttgctttttggagctttgatgataatgagaatatgggcggggtagcccatgaaacctatccggcagcaggatatatgttgaacgatacattggctgtagggctgctgactgatgctggtgataaaaatctgtggacacgcaatatccgccgccgtccgtctaaacagggggaaatcggttttagagcgatacgcgaaatttgtgatgctaatcttatcaggattgccgatgaaagacagcgtcaaaaaggagattatttcgtgaaattcactttcggtgaagtatccgattttaatcatccggtgaatacttgcttttacccagttcctgaaatacagaaatggaaatcttatgcaggtgccagtttggaaaggaacgggaatgtgtttactgtgaaaggaaattcggtgcaaagtgaaatatctggtgtacgtatcccttataaattgtctgatggtttttatacaa

SEQ ID NO: 460 - DNA, 69056 bp, Bacteroides stercoris
  source 1..69056: mol_type = genomic DNA
attttagaaagaaaagagataatatattagttacaaacctttaaattgaaaagcgcctatggaacaatgaaaacaccttagatgagaatagtttattctatctttcataacattttactttgtcttttttgagaaaactatttaatttaataacaaatcatcaatcacttatgaatgaagaacggaaaaaacgaggattgacgtcaagtaaattcctcactgcgatagttgttggtgcattgcttatcaatagcaataatgtgttggctacccaagcgctttcaaatgatctcttgaaagtatcagagcaattgcaagtacaggctattaccggtttggtggtagatactcatggagagcctgtcattggagccagcgttgtagaaaaggggacgacaaatggtattgtgacagacttggatggaaaatttaccttgaatgtaaaattgggcgctactattcaggtgtcttttgttggttaccagactcaagaagtaaaggctgccaaaacgatgaaagtaactttggttgaggatacggaactgcttgatgaagtagtggtagtgggctatggttcacagaaaaaagcaaacttgaccggtgccgtgtctacagtagatgtcggcaaaaccttgagtgctaagccacagatggatgtaactaaagctttacaaggggtagttccaggtctgactatcttgaatactcagggaggcattaacgagcaacctaaaatgactattcgcggtgtcggtactttaagtaacaaagaatccagcgacccgcttattattgtagacggtgtacctttggatgatctttcattgataaatccgcaggacattgataatgtatccgtgttaaaagatgctgcttccacttccatttacggttctcgtgcagcttttggagttgtacttatcacaacgaaacaaggaactaagaaagataaggtatctattaattattctaataactttgcatggagtaccccgagcattttaccggaatatgcagatgtgccttcgcaactaaaagcattgattgccgtaaacgagcgaaatggaacggcacctgaactatttggtatgtatttggacaaaatgttgccttatgccgaggcatggcaggcacagcatggtcacaagaaaaccggttaccgtgacatgcagcctttccagagtatggataatgtaggtgactattatttagatccgacaacaggaaaagccatgtattatgccgactgggatgtgacaggtatcatgtaccggaattgggctccgtctcaaagtcataatgtcaatgtgcaaggaactagcggccgtacgacttattatctttctttcgggtatgacaagaaagaaggggtgctgaactttaatcctgaccaagtaagacgttataatgtaaatgccaatattacttccgatctcacagattggttacaagtgggaggacgtttcagttttacagacagagattatacggaacctaatactcgccgtagtacgtatcagtatttttggcgttggggcagtttcttcgaacctctaggtacgattgacggtacggatatgagaaatgcgatttcttatcttaaacaagcgggtaacaatgaaaccagtacgaattatgtgcgaatgactggatttgcaaaagctaaattatttaaaggttttactttgaatgcagattatacatataatgtcaagaatctgttccaggataaggtaggacttcctgttgctgatgtatatgattcatggggtaatataacaactccgactacagtggtttcggacagctatttgcaacagcaaagtgaaaagacgacttcttacgctttcaatgtttatgctaattatgaattcaatcttaagcaaaaacataactttaatattatgttgggagcaaacgccgaaggtgaagaattttattggcatcgttccaaaaagatgggactcttaaatcccaatcagccggagtttgggttggcaaacggtacacagactgtagacggtcgccatgtgcattctgctactgccggttactttggacgcatcaattataattggaatgagatatggctcttggaattgaatggacgttttgatggttcttcttcattcccttcaaaagatcgttgggcatttttcccgtcggcatctgtcggctatagatttagccaggagggttattttgataagttgcgcactataatcaataatggtaaactgcgtgcttcactcggagaaattggaaatgaagcagtaggtgaagatatgtttatatctaccatttctacagtagacaatcgttattggttagatagcgaaggaaacctgatgaccatgtataatgttccttctttagtatccagctcattgacttgggagcgtatccgtacattggacttaggtatcgatttggggttcttgaataatgaattaaacgttagcttcgattggtatcaacgtaagacgttggatatgttggctccaggcgtaactcttccggatgtgctgggaactaaagaaccttataccaatgctggttctttacgtacacgcggctgggaattgaatttgagctggaatcatcgttttggtgactttaatgtatatgcaagcggtaatctcagcgattataaaacggtagttacagattggaacaatccgcaaggtatcttgagtgattatttttccggaaaagtttacggtgatatttatggttttgaaacagatcggcttttcacgaaagatgactttacttacgacgcagaaggcaatcgtaccggttatgcaaaaggtgtggctaatcaggatggattggtaaatggcggtaatttcatatatggtcccggtgatgtgaaattcaaggatttggatggaaacggtactattgatggtggcaagggtaccaaagacgatatgggcgacttgaaagtaataggtaactctacaccacgctatcagtatggtttccgtttgggtggctcatggaaaggcatcgaccttgatatgtatttccaaggtgtaggtaagtgggaccaatggtcgtatggcgcttttgttatgccgttctcacgtggtgccgacggtatttatgccaatcaaatggattattggaccgaagataatccggatgctttctatccgcgtccttatccgggtagtggaacttccggaacagtttcaggggtaggtaaaggtgcttataatttctatccgcagagccgttatctggtagaccgttcttatctgcgttttaagaacctgaccataggctatacattgcctcaagagcttacaaagaaatggtatctccagaaagtgcgtttttattttactgccgaaaatctttgcgaattaattaataacagttatgcgcctgtcgatcctgaaatagatgccagtgaaggcggtacggatgctgatgctatgcaaaacggtgtatggggacgtgtagcgcctatgacgcgtacggtttcgtttggtttacaagtttcattctaaaacattattaattatgaaaaaaagaacattcatatatagcatgatgctgcttgggactttgtcgttttcaagctgtacggatatgttggataaggaaccattggacaaatttacagatggtcctttattttggaacaatcctgctagtgtagagggttatgcaggtactttctataacttgtttaaaggttatggaaacggtggtggaagcggtgacttttattttaagtttctttcagatgatcaggtaggttcaggttttgaaaattggaagttttcgaatgttcctgcttcaagtggagactggtcaagtacatgggatgaaattaggcgtgccaatgccatgctttattctttggagacacaagctaccgacatggatgaagaaactaaaaatcattggaaaggtgtggcacggctgatgcgtggttggcagtactgggatttggttcgtaagtttggcgattgtacatggatagaccatgctatcatggatgaaacggatccgttgctgtttgcagctcgcgaagatagagatgaaattatggataaagtacttgaggacttgaacttcgcttgcaccaatatcaaagaaataaattcgcaaacaacctggtcgcgtaatttggcacacgccatgaagtctaacatttgtttatgggaaggtaccttccgtaaataccgtacacaggcggaaaatgggaaggcaccggatcttcaaggtgctaataaattccttgaagcatgtgctgaagcgtgcgaacagataatgtcaaaatattcattatgcgataattatcagtctatctacaattccgaaacactggctggtaatcctgaaatcatcttttataaagaatataagaaagacgtttttgaacattctctgatagactatacttgtactactaccgaaatgagtggtatgtctaaagatgcttttgattcgtatctgtttctggatggaaagacaaaagagcatacaatctatcccaatacagatgtggcagtaaaaaagaaatccgcagcagataataaggatcatcttaatataaaggatgtgttaagtgttcgggataagcgtttggctcttactatcgactctgttctttgttatggcgacggatggccgcggattgcaggtggacaaccgatgacatcttcttccggctatggtatatgtaagtatgataatatagccatcgatccgaattatcgccaacaaacgagttcaaattatacttctgctcctctgtattggcttgccgttatttatctgaattatgctgaggctaaggctgaattggggactattactaatgatgatttagagaatactattaataagctgaaaaaacgtgccgggctaccttctattacaaaagatgtggctgatgcgggtgataatgatatgggagtcagcccgctgatttgggaaattcgtcgtgaacgccgttgtgagttgatgtttgataatgatttccgctattgggatttgattcgctggcaccaattggataaactggacaactctgttaatccggatattttgttgggagcgaatgtaagtaatgatcctgatattaatcatgataaatcgggtgattatattgacggctctacaggtaggattcgtgcatttgaggcaaaacattacctatatccgattccgagcggtcagcttacgttgaattctaatatgtcacagaatcctttgtgggtagaataacaaggtaagtatttttccataaaaatcccttttaccaaaaacggattaacataagtctgatagattttcaactaaaaagaactcgtgttaatccggtatggtaaaagggatttttactgttaatgaatggtttaaagcgctttctctctaatcagatactctgcaatctgtaccgcattcaatgcagcaccttttttgatttggtcacccacaatccagaaagtcaatccgttctcgttggtgaggtccttgcggatacgtcctacgtatacggggtcttttcctgcgaggaacagcggcatcggatattctttctctgccggattgtccattaataccagtccgtcacctttggcaaatgcttcacgtgcctcctcgatagagatgggccgttctgtctctacccagatactttccgaatgcgagcggagggcaggtacacggacacatgttgcgctgactttgatgtcggagtgcataatcttacgtgtttcgttgtacatcttcatctcttccttggtatatccgttttcagtgaacacatcaatctggggaatcagattgaatgccagttgataggcaaatttctccacggtcacgggttcacccgccaatacttggcgatattgttcgtacaactcatccatagcagcggcgcctgcaccgctggcagcctgatacgtggatacgtgtacggtttttatatgagaaagctgttcgatggctttcagtgccactaccatttggatagtagtacagttaggattggcgataacgccgcgcggacggtctttggcatcggcggcattgacttcgggtacaaccaaaggaacatcggcatccatacggaaagcgcttgaattgtcaatcatcacagcgccgtgcttggtgattgtttcaagatactctttagaggtgcctgcgcctgcggaagtgaaagcaatgtcaacccctttaaagtcatcgttgtgttgcaagagtttaacctcgatctgtttaccgcggaaggtatatttagtgccggcactgcgtttagaaccgaacaatactaactcgtccaacgggaaattcctttcatcgagcactcgcaggaactcttgtcctacggctccgcttgctccaacaatagctactttcatttttcttttgttttaatttagtttataaaatagttctaatctatctataaatgatagagttggctgcaaatttataacaaattgctgtatgacaccgcataaagtgaaaactttttcgttattttgcagttaaaacctaaaactcactgcgtatggactggctcaatttcagtttgacacttcctgtaacagaccctacatggatattcctccttgtactccttattatattgtttgcgcccatattgctgaataaattgcgtataccgcacattatcggtatgattctggcgggattggtgattggcgagcatggcttcaatatcttggtgcgcgacagcagtttcgagttgttcggcaaggtcggactttattatatcatgttcctggcagggttggaaatgaatatgggcgatttcaagaagaatcgcggaaaggctgtgatgctgggattgctggctttcgtcattccgataggcataggcttggttaccaatatgatgttgctgaagtatagtctcgtgacgtccatattgctggcaagtatgtatgcctcgcacacgctggtggcttacccgattgtaattcgttacggtgtgtcccgccatcgcagtgtaagtattgctgtgggcggtacggctgtgacggatacgcttacgttgctggtgctggctgtggtgggcggtctgtttaaaggagagtccggcggactgttctggctgtggctggtggttaaggtcatattcctcggagcgctgattatgtattcgttcccacgcatcggacgctggttcttccgccgctatgatgataacgtgatgcaatttattttcgtacttgccatggtttttctgggagcgggtttaatggagttcgtgggaatggaaggcatcttgggagcattcttggcagggctggtcttgaaccgcctcataccgcatgtatcaccgttgatgaatcatctggagtttgtcggtaacgctctgttcataccttatttcctgataggggtgggcatgctgattgatattcatgtcatcttcgggcagggagacgctttgaaggtggctgccgttatgattgttgtggcgctggtgggcaagtggatcgcttcctggctgacgcagaaaatttataaaatggctcccatagagcgtgagctgatgtttggcttgagcaatgcacaagcagcagctacgctggcggcggtattggtgggttataatatcatcttgccgaacggtgagcgtttgttgaatgaggatgtgctgaacggtacggtattgctgattcttgtgacatgtgtggtgagctcctttattacggaaagggccgcacgcaagattgccatgtgcgaggcgcatctggaagaggagcgtacggttgaggcggaaaggattcttattccggtggcgaatccggatacgattgaatatctgatgaacctgtccttgttgatacgtgataccaaacagaaagataatctgttggctttgaacgtaatcaatgacaacaatacttccgagggtttggagcttcgcggtaaaaggtatttggagaaggcagccatgattacggcttctgccgatgtgccgttgcgccagattacacggtatgacttgaatattgcttcgggtattatccatacggcgaaagaatatgaggtgaccgatgtgattatcggtttgcaccgtaaggtcaatattgtagactctttcttcggtatgcttgccgagaacctgctgaaaggactgcatcgcgaagttatgattgccaaattcctgattccgattaatacgatacggcgaatcatcatagccgttcctcccaaggcggaatacgaagcaggctttcagaagtgggtggagcatttttgccggatgggcggtacgttgggctgccgggtacatttctttgcaaacgaggaaacaactgtacagttgcaggcattggtgaagaaaaagtatggacagaccttgacggacttctctcgtctggatgattggggggatttgctgatactgaccgggcaagtgaattacgaccatttgcttgtagtgataagcgcacgtagggggtccatctcttacgacagctctttcgagaagctcccggcgcagttgagcaaatacttctccaataatagtttgattgtactttatcccgaccagttgggcgaaccccaggatgccgtctctttctctaatccgcgaaatgaggcgcagcattacgagaaggtaggaaagtgggtttataaatggtttaaggaagattagtaagtgattagtgattaatgattagcggttggcgatgatggaggattggaaacagagaacccggcttttgctgggagaggagaaaatggaaaggctgcaacaggcgcatgtgctggttgtaggtcttggtggagtaggcgcttatgcagccgaaatgatatgccgtgcaggtgtgggacggatgacgattgtggatgcggacacggtgcagcctaccaatataaatcgtcaactgcctgctttgcattccactatggggagggagaaagcggaggttttggcggcacgtttcaaagatatcaatccggacatacagttgacggtgctgccggtatttctgaaagacgataatatacccgaactgcttgatgccgcccgatatgattttgtagtggatgccatcgatacacttgctcccaaatgctatttgatagcggaagcactgaaacggcatattaagattgtgtcgagtatgggggcgggcgcaaagagtgatattacgcagatacgttttgccgatatatgggatacctatcattgcggattgagtaaggcggtgaggaaacgtttgcagaagttggggattaaacgtaaactgccggttgtattcagtaccgagcaagccgaccctaaggcagtgctgttgacggaagatgaacagaataaaaagtccacttgcggaactgtaagctatatgccggctgtattcggctgttaccttgcggaatacgtcattaaaaggttgtaatagggttatcaaacagtcagaacgtacctatgtgttaaagataaaatgtgtcatgaccgtaaggaataaacagtaactaaaacaatgatacgattagaaggaataacgaagagtttcggcagtttacaggtgttgcggggcatcgacctggagataaaaaaaggggaggtggtcagtattgtcggtcccagcggtgcgggcaagaccactttgttgcagattatgggaactttggacatgcccgatagcggttcggtaatgattgacgatacattggtgaattgcctgaaggagaaagaactctccgccttccgtaataagcatataggctttgtctttcagttccatcagttgttgccggaatttacggctttggagaatgtaatgataccggctttcattgccggaatgggacagcaggaagccagagcggcggctgccgaaatattggacttcatgggattggcggaacgcgcttcgcacaagcccaatgagttgtccggtggcgagaagcaaagggttgccgttgcccgtgcgctcatcaatcatcctgcggtggtgttggcggatgagccgtccggaagtttggatacgcataataaggaagagctgcaccaactgttctttgatttgcgtaaccgtttgggccagacatttgtaattgtgacgcatgatgagggattggcacaaatcaccgaccgtaccattcatctgaaggacggtgaagtttgtaaggaatagctgtctgtctcttcattattcaaaacaaacatagtgactaagccgctccaaatcgctttcggtaaattcttcgtagagggcaaagggtttgaggttgtggagtattcctttctttttacggtattccacaagggcttttgcctggtaaaagtttatataaggatggttgcgaaggcgctctatgccgacccggttcagattgatgcgtcggatttcagaaggcataatggtgaaccatgcttgcagttggcgataatccaaatgaatctcctgcaattgctctattcggtagaagccgcctaaacgttgccgatagttcactatcgaccgggctatgccgctgcctacgccgggaattttcttcaattcagtggtatctgcatggtttaagttaagcacggtgcctgccggatatttataaatactgtctttgggtgtctgctgaagagtgagtagagaggtcgcctttcttatagtgtcttctgccgtaaaatagatgtagggagagagcgtttggtactgttcttctgtcaatccatatacttttttgaaatcttcggccttacggaactttccccctttgcttcgataacgtaagatgttctttgccatccatgcaggaagacctaagcggcagaaggtgacggagtccgtacggttagggtcgaaaggagctaatacaactgttctctttttatatctctccgatttcttgaaacggctgttctcgtttttttcttgttcccgcacagaactgataaagttgtcgtattctttcaaggcggcagcctgtatcctggcttcttcttcagaaagttgcctgttgttttgccggaaagaatagatatacccggagagaaagatgaggactatcccaatgatgagaacaaggatacctcgcctttctccccgggagaagtataagaagtctttaaacggattcttcattatggtttatttgaagaagcccaattcgttgatgaaaataagtccgattcctattggggcgatatatttcagaatgaagattagtaatctgtatatatgtatatttaaagttccgttattgctgacttcttcccatacaatctttttatccaggtaccatccggtgaagatagagataaagaacccgcctaagggcaacatgattttagcggtgacgaagtcgaataaatcgaacaggttaaggccgaaaatcgtgtaactctttcctacgcccaatgacagcgaacacaacactcccagcacaatacagccggcggtaaccagtttggctgcttttcctcgtgtaaacttgaactcctcatgcagatatgctgttaccacttcgtgcaaggaaatggttgaagtcaatgccgccagcgccagcaaaacgtagaacatgatggataaggcgattgccagccagggtatgttgccgaatgcctgttgaaatacgttgggtaaggtgatgaacaataaactcggtcctgcatccggctgaatgccaacggaaaacgccgcagggaagataatgaatccggcaagaatggcgactaacgtatcgatacctgccacattgagtgctgttttaggcaggttggtgtcatttctgaaataagaagcgtatgtgcaaagacatcccataccgaggctgagtgaaaagaatgcctgtcccattgcacctaagaaaacattaccgtccactttgctgaagtcgggtttcagcaggaattcgatacccgcacttgcaccgggtagtgatacggaacaaatggcaagcactaccagcaggataaacagcatgggcatcattatcttggctgatttttcaatacccttttccactccttttatgatgatgaagtgagtggctaacaagaataccaccaaccagataacaggacgccacggattgctgacaaagccgttgaaggaagcgatgaactctgcggcggacttaccggcaaaactgttggttgcggcttctcctataaactccaaagtccaacccgctactaccgagtagtagcccaaaataaggaatccggctaatacacccattcgtcccacccaacgccaatgggttcccggagccagcttttgatacgctccggcagtgttggcgcgtgaacggcgtccgataagaaattcggctatcatgataggaatacctaatataagtacacataccagataaatcagtatgaaggctgcaccgccatgattgcctgtttcaaaagggaatctccagatattacccaggccaactgcagaaccggctgaagcaagtatcactcccaatttgcttccaaagttggctctttcatttcttgtcataaaacgtggatttttcttacaattcgttattaattgctcttaaaacgcacaaatatagaaaatgttccatacttttgcacacagattgttcataatttgagatatgctatattatattaagaaatatccggtatcgctggtgataatacttgctgtaatttatctgtcgttttttaaaccgcccactaccgatctgggcactatccctaaccttgacaaggtggtgcatatctgtatgtatttcggcatgtccggtatgttgtggctggagttcttgcgggcgcatcggagagaccgtacgcctatgtggcacgcatgggtaggagcatttgtctgtccggtattgttcagcggagcggtagaattgttacaggcattttgtactacctaccgtggcggcgattggctggattttgcagccaataccacgggagctgtcctggcgtcattggtggcttgtttcgtgctgaaaccaagagtgatgcgtaaatctacagattagagataatcgactaccgtattcagttttattccgttcgagccttttatcaggattgtctttccgcagggtttgttcttttggagcgcggctattagagccggagcatcgggataagtggtatacgtgtggcgggttgctgcaaataattcgcctaccaatattacatcctcaaagccatattcttccagatagtccactattctctggtgctcttcggcactgtcttttcccagttcgcgcatatctcccaatatcagcatttttttctcggcttgcatgttgcggaaatttccgatggctgccagcatgcttgtgggattggcgttgtaggcatcgataatcagggtgttgtcggccgtttttttcagttgcgaacggttgttccggggttcatattcattcagggctttgtctatcttctctgcttctactccgaagaaatgtccgatagtgacggctgccagagcattgggaaagttatattcgccaatcagccgggtatgcacttggtgaaattctccttcttttccggctctccactcaaaagcgaggtagggggaattgccggtaacgtggccgttgatatacagactgttttcttctccgtaggttatcggattcagtccccgggctatttccctgaggtaaggattgtcctgatgaaggaagatggtggagtttccctgccggcgcagatagtcgtacagttcgcctttggtccggataacgccttcgaaagaaccgaagccttccaaatgagcttttcctacattggtgataatcccataatcgggttcggctatttccaccagttccttgatgtcgccggggtggctggctcccatttctactacgccgagctcatgctctgttgtcaggcgcaacaaggtgagcggtacaccgatcggattattcagatttcccagtgtgtacagtacattgtacttttgggacaatacggcggatataagctccttggtcgttgttttcccattggttcctgtaatgccgatgatgcgcgtacccagttggcggcggtgataattggcaagctgttgcaaggtgtgcaggcagttatccactaatatataacgtgtatctccggcaggagcataggcggcttcgtctacaacggcgtaggtgctgcctgcttccaatgctttggcggcaaaggcgttgccgttgaacgtatcgcctttcaaggcgataaacagtgagccttcggggcagttgcggctgtcggtggttatgccggtgcagccgagaaatatctgataaagagcggttatatccatatctttctccttcggggagttttgcagttcgtaataaaattgatattttgcgaacaaagataccttatttttcagacttggtgtaccaacaatggcttttttgtttacatttgcagatatataaatcaaaaaacgctgccatgaaagttctgcaatccaaatatataaatgtcaacggttctctgttggacctttcttctccctgcatcatgggaattctcaatgtcacccccgattctttttatgccggcagccgcatgcagacggaagccgacataacaagccgcatagggcagattgtggcggaaggagctgctatcatcgatgtgggcgcttactcttcgcgtcccaatgcggagaatgtgtcgcctgcggaagagatggaacgcttgcgcatggggttgggtattctgagaaaagtacagcccgatgcgattgtttcggtagatacctttagggcggatgtggcgagaatgtgtgtcgaggaatacggtgtggcaattatcaatgatatagctgccggagaaatggatgatgatatgttccgtacggttgccgatctgaatgttccttatatcatgatgcacatgcagggtacaccgcaaaatatgcaacagcatccccattatgataatttgctgaaagaggtgtttatgtactttgcccgtaaggtgcagcaattacgcgatttaggtgtaaaggatatcatattggaccccgggttcggctttggaaagaccattgagcataattatgaattgttggctcatctggaggaatttcgcgtttttgaacttcccttgctggttggcgtttcccgtaaatctatgatttatcgtttgttgggaactactccgcaggaagcgttgaacggtacaaccgtattggataccatctgtctgttgaaaggggctgatatacttcgtgtgcacgatgtgcgcgaggcagtggaaacggtgaaaatcgtggaagccatgaatgcggcccgttctgcgttaatcgctaataattaaccattaatcacttgcgaccgtgttttttgaatttggcataaaagattttatagatatcctgctggtagctttcctgctttactatacatataagctgatgaaagcttccggatctatcaatgtgtttacgggtatactggtgtttatcctgatttggctggtggtttctcaggtgctggagatgaaactgttagggtctatttttgataaattggtcagtgtgggtgtgttggcacttatcgtcttgtttcaggatgaaatacggcggtttttgcttacgctcggttcgcatcagcatgccagtgcgttggtgcgcttctttacgggaaacaagaaagaaggtatggaacacgatgaaattatgcctgttgtaatggcttgtatcagtatgggcaagcagaaagtcggtgcattgattgtggtggaacataatatgccgttggacgatgtggtgcgtacaggggagattatcaacgccgatataaaccagcgcctgatagaaaatatctttttcaagaacagcccgttgcacgacggagctatggttatcagcaagaaacgcattaaggcggcaggatgtatcctgcccgtgtcgcataatctggatattccgaaagaattgggcttgcggcatcgtgcggcgatgggaatatctcaggtgtcggatgcccatgcgatcattgtatcggaagaaacaggctctatttcggtagcctacaaagggcagttttatctgcgcctgagtgccgaggaattggagagtcttttgacaaaagaaatttagatgcggcattagtaggctgaggcgcattggttgttcggtaatcaaaggtagctctcctttctgtattcccccgttatattgaggataagcgacctgtaatttataacttataacaaatttatatggatagacgaaacttcttgcgaaccggcggaatggccgttcttggttcactggctatgccttcgctggctatgcccgggtctgtgcgcggagcattgggcggtgcggactctaagtctgccgttgctgccgctgccaatcattttggtgtgacggaagcggatttaaagaaagtaatggctgttgctttggaaaagggcggcaattatgcggacctttacttcgaacacactttcaataatagtgtgagtttaatggacggtaaggtgaataactgcggctccaatatcgatttcggtatgggagtgcgtgtgctttccggagaccaaagtggctatgcctatgtagaaggcgttaccttggaagaaatgttgcgtgccgcccgtactgctgcccgtattgcatcttcgggcagagcaggcaaacctgtggggctgacggagaaaaccatagcccggagccgctatgccgtggctactccctgggaagatgtgggtgtaaaagagaagattccctatttggagaaactgaatgagaaaatattctctttggacaaccgtgtgcgaaaggtacaggcctatttgcaggacagcacttcgcatgtactgttctgcaattcggaaggtgtgagttattacgactaccgtccaatggtatcctttatggcagtctgcatcatggaggagaacggtaagatggaaaacggctatgcaggcaggtcttaccgcaagggattcgaatttatgaccgacgatgtggtggacgtgattgcccgtgaagtggtagatcgtactgctattctatttaaggccattaagcctaaaggtggtgaaatgcccgttgtaatgggttcgggcggttcgggaatcctgctgcacgaggctatagggcatgcgttcgaggcagacttcaaccgtaaggatatatccatatttgccggtcagttgaacaagaaggtgtgcaacgaacatattaacgtggtggatgacggtacgatacctttcaatcggggttccgtgaatttcgacgatgaaggcgtagaggggcagaaaacgtatattgtcaaggaaggtgtgctcaccagctacctgcacgaccgtatcagtgcaaagcattacggtgtgaatcccaccggaaacggtcgccgcgatacattccgtaacctgcctattccccgtatgcgtgctacgtatatggaagccggcaatatgaaagaagcggatattatttctacggtgaagaacggtattttcgtagacacctttacgaatggtcaggtacagattggagccggtgactttacgttcttcgtgaagtccggttatttgattgaggacggaaagctgacgcagcccattaaggacatcaatatcataggtaatggtccgaaagcattggcagacatcacaatggtggccgacaatgataagattgacaatggtacatggacctgtggtaaggatggacagtcttgtccggtgacgtgcggtatgccgtcggcattagtcagcaaactcaccgtaggaggggaaaattaagtactaacggagcattgataactgataatttctaattgtcaattatcaacagctaacaatcaactgaaaatatgattacagacaataataaaaagctggcgcagtgggcaatggactatgccttgaaaaacgggtgtcaggcagcaaagttggtgttgtactccaactccaacgcttcatttgaattacgcgatgccaagatggacagattgcaacaagcctcggaaagcgggttgagcatcagtttgtatgtggacggcaggtacggttcttattcaaccaaccgtttggataagaaagaactggagacgtttataaagaacggtatcgaatctacgcgctatctggcagtggatgaggcacgtgtgttgcccgatgcttcccgttattataaaggtggaaagccggacctgcaattgtttgacaggcgtttcgaaactattaatccggacgacaaagttgccattgcgcgtgctactgccgaagaagtcttgagcaaagacagccgcattatatccgtaggaacttcgtatggtgacggagaaagctcttcctaccgcttgacgagcaacggttttgaaggcgagtccaagtctacctggttttcgctttctgccgatgtggcattgcgtggtgagggagaggcgcgtccatcttcttattggtatgaatcggctctgttttacgacaaactggtaaaatcgggtgtcggaacgaaagccttggagcgcgtactgcggaaacttggacagaagaaggttgcttccggcaagtatacaatggtggtagacccgatgaatgcaagtaatttgctcagtccggtactgagtgcgctgtacggttcggcattacagcaaaaaaactcttttctgttggataagctgaatgtgaaagtaggtgccggattattgaatctgatggatgagccccatttaatcggtgcaagcggtgcgcgctatttcgatagcgaaggagtggcaaccgaacggcgttctatctttgaagaaggtgtgttgaagacatacttcattgatacctacaactctaaaaaaatgggagtggagccgactgtcaactctccttccttattggtgctcaaaccgggaaacaaagatttgaacggtctggtggccgacgtgcagaaaggcatcctggttaccggattcaatggcggtaattgtaacagtagctccggagacttttcgtacggtatagagggcttcctgattgaaaatggtaaattgacccagcccgtcagcgaaatgaatgtcacgggtaatatgattacgctttgggcttctttatcggctgtgggtaatgatccccgtatgtcttcttcatggcgcatcccgtcgctggtattcgaaggggtagacttcagcggattgtaagaactgttaattcagcattaaactcatgtaagggtttgatggcgataatatcttttcggtaagttcgccgacagtgagtgccaagtggctgcccggcagccgcttggcactacttatacacttgccgttattcagatagtagtaaccgttattggcgctgatctgcgggtctgtaagtgcgatgctcattttcagttccggatgctcggcggcatatcgttgcagtatcgttttggcattgatgatgcgcgccatacccaatacttgcggggtcggctctgtttcagacggaacaataacccggatggacgggaggttcagttgttcgcaaatacgttgtagtaataacaggtacataccggaagtttccgctacgatttctcctgcctgccaagtactgcctgccggatatacgatggctaaagccgtaatcttatcgccttgcttcaatgtatagacgcagcctttccccaactgtaaatcggcaaggattacccggaagtccgtttccgtatgctggatgcaataggggcgttcccgcagtttccggtttaaatagcgatatgattcttcctgataatcatttattttgttcagaacaactgctttgtcagcgatggtaacctctgaagccgtgaaggttgttgaggagtatttaaaaaccggtacgtagcccataccggcataatacccgaacaaccagggttctgccggaatcagcgtggaaatggacatgtcattgtgtagcatacgggtaaaggcttgcgataacagttcgcgcatagccccgcgattgcgataatcgggatgcgtacaggcccccgacacatatcctgtcttgatttcgctctttccgaatgtcatgggatagggtagtatttgcagggcggcaatcacctcttcaccgctttgaatggcgatgttgacttcattgctgtaacgcaagcggaaatacatatctgtaaattcattgctgtcgttaaagcatagtttccataaactctttatcttttcccgcattgcttcatcccttatcataattgtgcaccctgttttatagccctgtcactttaccttttttaccacttgatagcctctaccggctgttcttttaaacaggcgacgtatttctccagaataatggcaggctgataggaaagttttgctttccgcaacccttcaatacccaagtcctcttcccggttgatgtagatatattgttctggaatatggttggcaaattcgtaattaatcatggcataagcgccgtctatacgggtatcggccttttctacatgtactccgaacgtgtcttggttgataggcatgccgaaagtaaaagccgcaatcttgccctctacatggagaataccgcccgtaagccctaacgcatcgaaattgtgcagggcgtatatcaatgcacggcgttcgttgccggtaccttcatgctggtcgcagttgttgactttgcaccattccgcttccaaatcgaggcactcccggatacggtcggctgtaatcggagtatattcgtaattataagtctttttgaatttgttgatatgattccgctttgcctgaaactttttgccggataaggtggcgaggtcggagcgcagatatacgtagtcggcgtaatccctgtctgctgtaaactgaaacctgccgggcataaaggtttccagttcggagcacattccggcgcagatacccaacaagcaaaaaggctctccttcccggttggcatcttctatcagcgcatccagtaccttgtttaaatcgccgttgccgataggcatcatatatacaagctctccgtctgcccagaatttcaataataggaaaccgtccataatggcaaacttggtgttgtataagaaacgccaactgcataggttggagaatgaaaggtcgcagttgcgtcgcggactgtttaaagtaaaggaagtaatcagctctttatcttgtagttcgatatctttaaatggaatcataaataatttctattggttataagaatataataacaaagataagaagattttgttagagtaaccctaacaatcgtaaaatagtaggggttagcaaggctgtaaatattccgttaagcgtcagaccgaggctggcaaacgcaccgtatttgctgctgatgtccattgctgtggatgtgccgacagcatgggctgctgcccctaaggaaagcccttgagccatggggcttccgatatgggtgagtttcattgtcttgaaaccgaggattcctcccaacaggcctacgcaaaccactacggcggcagtcagcgcgggaatgccgcctattgatttcgtaacttccatggctatcggggtagtaacggattttggagccagcgagtagataatctcgtcggaggctcccatcagttttgctatcaggactacggaaataacccctacaatacatcctgccaattgtgaaagcaggataggcagcaattgtttcttgatagtctccaattgcagatacaaaggaacccccaacgcaacgacggcaggttttaaccagaattcaatcagatgcccgcctttgttgtaagtatcataactgatatttgtcatcttcaggaaaatgataagcagggcaatagtcagtaagatgggattcagcagcatgattcctgtcttcttttgaagaagtttggctaagaagaatatcccgaaagtaatagccagcaggaagaattcgttttctaaaaagttcatttgattttacgtgttaattggtgaacccatccggtaaccacgagtaccagcagggtgctgactaatgaagcgatggcgataggccagaattcggcggcgataatgtcgaaatagagcataagggctacgccgggcgggataaagaagaatcccagattagcaaccaagaagtcggacattccctgcacccagtgcagttttatccaacccaattttaagaaaagggtgagcagcagcataccgatgatgctggacggaagtttgatacccgttaagaatacaatcaattcacccaaagccagacatccgaaaaggatggcgcattgacggatcataatacctgattattaaataatacctaacctattgaaaatattgaaaacgttgcaaagttagctatttgaagtgaggaactgtctcgtaaatccactgttagtgttaaatattacaataattctcatttggtgtggaaaaagccccgaaattgcaatgtgtatattgcaaaattgtgtacttttgctgcgtgaataacacgaactactgattcttatacacaattaaaatatcatgcaaagattaattaatgaaattttagagcgtgcgaaagccgatcgtcaacgcattgttcttcctgaaggtacggaagaacgcactttgaaagctgccaatcaaattctgacagatggtattgcagacctgattcttttgggcaatcctgctgaaatcaacgcttgtgcaacggagtggggacttggtaacatttccaaggcaaccattatcgacccggaaaacaatcccaagcaggaagagtatgcacaactgctgttcgagttgcgtaagaaaaaaggcatgactattgaagaagcccgtaagctggtaaccaatccgctttatctgggctgtctgattatcaagaacggcgatgccgacggtcagttggcaggtgcacgcaatactaccggtgatgtgcttcgtccggctttgcagattatcaagactgctccgggcattacctgcgtttccggtgcaatgttgttgctgactcatgctcccgaatatggtaagaatggtattctggtaatgggtgacgttgccgttactccggttcccgatgcttctcaattggcgcaaatcgctgtttgtactgcacgtacggctcaggctgtcgcaggcattgatccgaaagtggcgctgttgagtttctctacaaaaggttctgcaaaacacgaagtggtagacaaagtggtagaagccttgaagattgctaaagaaatggctcctgatattgctattgatggcgagttgcaggctgacgcagcattggttcctgaagtcggtgccagcaaagctccgggttctgccattgcaggtaatgcaaacgtgctggttgttccgagcctcgaagtaggtaatatctcttacaaactggtacagcgtctgggacatgccgatgcggtaggtccgattctgcaaggtatcgcacgtccggtgaacgatttgtcacgcggttgctccatcgaagatgtatatcgtatgattgccattacggcaaatcaggctattgcagctaaacacaataaataattatggattttgaattatgaattatgattggggatttcttcctgttcatggttcatggttcgcggttcataattcggaattcataatttataatttaacattagtatcatgaaagttttagtattgaactgcggtagctcgtccatcaaatataagttgtttgatatggaccataaagaggttatcgctcaaggtggcattgaaaaaatcggtttgaaaggctctttcctgaaattgaccttgcctgatggcgggaagaaaattctggaaaaagacataccggagcatactgtgggtgtggagttcatcctcaatacattgatcagccccgaatacggcgcaatcaagtctttggacgaaatcaatgcggtaggtcaccgtatggtacacggcggcgagaagttcagcgaatccgttttgctgactcaggaggtgctggacgcctttactgcctgcaatgatttggctccgcttcacaatcctgccaacttgaagggtgtaaacgctatttccgccattctgcccgatgttccgcagattggtgtgtttgataccgctttccatcagacgatgcccgattatgcctatctgtatgccgttccttacgaactgtataagaaatacggggttcgccgttatggcttccacggaacttctcaccgttatgtatcaaagcgtgtgtgcgaatttctgggcgtacagccggagggaaagagaatcattacctgtcacatcggtaatggtggttccatctctgccattaaagacggcaagtgtatggacaccagcatgggtctgactccgctggagggtctgatgatgggtacccgtagcggtgacatcgatgcgggagccgtgactttcatcatggagaaagagggtttggatgcaaacggagtatccaatcttctgaacaagaagagcggtgtaatgggtatcttcggtgagtcgagcgatatgcgcgatttggagaacgccgtggctgccggtaacccgagagctattctggcagaaaagatgtacttctaccgcatcaagaagtatgtaggcgcttatgctgccgctttgggcggtgtggacatcatcgtgtttacgggcggtgtcggcgagaaccagtgcaactgccgtagcgaagtatgcgaaggtcttgaattcatgggtgtcaaggtcgacctggaaaagaacaaggtccgtggtgaagaagctgtaatctctacagacgattccagggtgaaggtagtggttatcccgaccgatgaagaactgatgattgcttcggatacaatggctatcttgaataaataataataaaatgggcaggctctctccctgctgaataaagtgcagccattaccctgtttgaagattatgcagaggtaatggctgctgcttttatatttttcgtgtgtttgatatttcagttcagcctattgaacgttattcttgaaggatgttctttttgatgaagaattttgattgtggatttaataaagtcgctattgctgcattgatatatgtcaatatattgctgtggatttcggtctactaagggaaaccaactgctttgtatctgaacaacaattttgtgtccctttttaaatgtatgtgcaatgtcattcatggaaaagcatatatgagtgggttgattgggagtaaaggcttcaggatgttcaaagctgttcctatatcttcctctcattacttctccccgtatcaacatttgatatccattcattaaataggtgtgcttttgaggtggattttgataatcattaggatattcatctataattttaactacgaaatctgcatctgttgtagttatagcaacttctagttcggctttaatggtaccgcctagggtaatgctttcttttagtggttcagtcttaaaagacaatacatctgggcggcgttcggaaaaacgctggtcgcctgtcatatattctttagggcgggtatatgtagtcttgtctgtatatggtacgggtttatcggggtctgatatatactctgaatgagattcctttttttctggaggacacatgtttagtgttccgttttcacccaaatagaatgaaagggggcgtgtgtctgttggtggccatgcatggaattgcttccactcgttttttccggagaagaaaacggttgccttttgtgatgcgggagtgggacttcctatattgttcaaatggtattgtaggaaaggatattctatattattacggtaatatagaactgtttgagagccgaaatctatattgccgaggttgctttgccctttaccgttccaagcgccatgatgccatggccccataataatttccaaatcggtttgagggctttgcttgcgaatagccttgtataactcccaggctccataacaatcttctgcgtcaaatagacctcccactattaatacagcgggatcaatattgtaacaggaacgacggctgtcccgttcttgccaccattggtcataatttggatgttccattaattctttccaataggcgatgctgtcacctgcaatgcgggttaagtctttcaggctaccgacattcagaaaaaaagaatattcatctgttaggtaatagggcttggctggtggcaggttgtcggttggggtggggcgtgggcgattgactgaagtggcaaatctgaaaccgtcgcaaagcataaatgcgccgttgtggtgatagtcatcccccatgaaccagtcggtgacaggggcttggggaactacggctttgattgccggatgcttacttaatgcccccatgagtgcataaaatcctgaatacgaggagccgataataccaatatttccgttgttgtgtgtatgggctaacaaccattcggctgtatcatatacatcactggcttcatctgtgtcatcctgttttgttttattgcggatgaacgggcgtacattgatgaactcaccttcgctcttccaacgtcctcgcacgtcctgtattacaaaaatatatttttcgtgggcatactttttccatatgccccatagtctgttgttaaacttctttccgtagggtgatgccttgtaaggcgtccgggtcattaatataggtgctttttgggttcgctggagtggttcgtatattgcggtgtataagcatataccgtcccgcatgggaatcataacttcttttttatggtagttctcggttatccaagtttcagttatctcttgtgccgacaaattaagtgatagccaaatataaaatagggtaaagcataaggccttaccctgttgatttattgaatggatcatgatattagatgtattagatgtaatatatactatataccatattaaacaatgataagctctattccgatttcttcgatagactgtgccattgctttggatattccggaatctgtgatgatgacgtctacccgattgaggtcacaaatcttgccgaagcctctccgtccgaattttgaggaatcagccaatatgattgtacgcagggaagcttctatcattttcttatttagattagcttctgcaatatttgagttggtgattccatgttccaaatcaattccgtctactcccaaaaaaagtttggagcaggtgatttgttcaaaaagttgtgaagtataatcgccaattacagaacaggagttttttcggacagtgcctcctaattggataacttctatgttattgaccgcatttagcaatatggctgtttttaaagaagcagtcactacgattaaatgttctattggagtcagttgttcagcaagcatgtggacggttgatcctgaagctataataatagagtcgtttttctctattagtttggcagcggctattgcgattcttttcttttcgtttgtttgcaacttttctttctcttgaacattgatttctggagttacggggttaatgggacttgcgcttccatgagtgcggtaaagcagtttcttctcttctaaatattttagatctttccgaatggtaacgggagtgacctctagatctttagcgatatcatttactttgataaagccattcctgtttaaacattcaagaatgtacttatgtctttctgctatacttatcatttggaattctattttttacaaaggtaaactaaatcttaataagtagcaaatgaaagttgtaaaagtttcattatatgatataaatttctacttatctcttttttatttctaaaaacgaaaaaatatttgcttttttgttgtgttgtatttctttttatgtatttttgcagtgtttcttctttctctttatttcgtatttatgaaaaaatgaatagaaataaaagaaaacgaaataatccgcacgcctatggcagcatgttaaaagcagagaaataggaaagttggatgtgatatttatcattaaacattttattatgttatccgacctgtgtggtgagtaagatttgaataatgagtggtttgtttaatgtaaaattaaaaaatagtaccatgaaaaactatgcaaagctatttaaaatgtcaatggctctccttatgttggaaggtctgttgggagtatcggatttgtctgcacagaataaactgaacacactgaaatttgataaaacatctcagctgagagacttttttagttataaaggagacggaacgatactggttagcggtcatcgtggaggatacgaggtgggctatgcggagaactgtatagaaggtctggagaatgttcttacccaaatgcccgctttctttgaaatagatcctcgcctgactaaagacagtgtgattgtactaatgcacgatgcaactttggatcgtactaccacagggagaggtaaggtaaaggactatacatggaaggaacttcagtcgcttcgtttgaaagatcattccggcaaagtgacagactgccgcattccaactttagaagaagttattgtttggagtaaaggcaaaacaataatcaatttagataaaaaggatgttccgatgtctatgatcgcagctttgataaaaaagcataaagcggaaaaacatgtaatgctgacagtgcatacaggtgcacaggcgaggtattattacgaccgttttcctgatattatgatgtctgtctttgctcgcaacatgaaagagtttgaagatatatcaatttcgggtgtgccttgggaaaacatgattgcttatgttggccgcactttaactccggagaatagtaaaatatgcgaaatgcttcatgcgcatggagtgcgttgtatgattagtgtagcacctacgcatgacaaactgcctactgttgaagaacgtgcggcaaaatataaggaggagattgacaagaggccggatattatagaatcggatataccgacggaagtgtggaaggtcttgcactctcggtaattgatttgtcttccggaaataaatatcccggagtttgtgataaaaataacctaatggataatttaataataaggaaattataaatatgtcaagagttgaagatgccttgaaggctgcgaatgagacttgtgctcttcgtataggtagtgaagtgttaaatgaggtcgctgttatgtttaaagagcagtttcccgggaaaagggcggtagtcgttgctgatgaaacaacttgggatgttgttggtaaaaaagtggaagaagaattgaaaaaggcaggggtgaggttgcaaccggcattcatttttacacagccggacctgtatgctgaatattcttatatcgatcttttggtcgaatcattgaaagagcatgacgcaataccggtagcggtaggttccggaacaatcaatgatttgacaaaactttcctctcatctgacaggcaggagatatatgtgtgtagccactgcggcttctatggatggttatacggcatttggagcgtcgattacggcggagggtgctaaacaaacgtttagttgtccggctcctttggctgttttggccgatacgaacatcattagaaaagctcccggcattatgactgcttccgggtatgcggatttatttgcaaaagttacagcaggagctgactggatactggctgattggatgggtgttgagaaaatagatgagactgcttggagtattgttcaggatggtctgcatgatgctttggcaaatccggagggcgctgctgcaggtgatgatgaggctatatcgcaactggttgaggggcttatgctgggaggttttgctatgcagtggtctaaatcaagtcggcctgcttccggtgcagagcaccagtttagccatctttggaatatggagcaccatttgaataatggcgaacatatatctcatggatttcaagtcagtataggaatgttggctgttacggcattctatgaacaggttctgaggacccctttggaaaacttggatgtcgaagcctgttgtgcagcatggccgactccggaggaattgaagaaagctgcgctcgaaatgtttgtaggaactgatttcccgaatatcggagtacaggaaacgaaagctaagtacgtgacacgtgaagaattggccgttcagttgcagcagttgaaagaatattggccgaaaattcgggaacgcctacttgcacagttgcttccttataaagaagtaaaacggcgcttggagttggttggggctcctacggaaccggaacaaatcggtattacgaggaagcgtttacgtgatacgtttattcgtgcgcaatttatccgtcgccgttttactgtgcttgatcttgctgtgcgtagcggttatatgaatcaatggttggacggtttgttcggcaaaggaaagatttgggagataacggaataaaatacgaaagaacatgaaacaggagggaatgacgcctgaggtggcaaagaagtttaagtactggcaaacacgaactattatagcaagcatgataggctatgctttgttttattttgttcgtaagaacctaagtatagcaatgcctgccatgcaggaagatttaggtatcacaaaaggagatttgggattgttcctgacactgcatgggttgctgtatggggtttcaaagttcgctaacggttttattggcgatcgtgtgaatgcacgctattttatggtgacaggattggtgctttccgccgtttgtaatattttgtttggatttagttccgcagtgcttgtatttggtgttgtttggatgctgaacggctggtttcaagggatgggttttccgccttgtgctcgtttgctgactcactggattcctcctacgcaacttgcaaccaaaatgtccatatggaatacttcacattctattggtgccggcttggtggtgatagtatgcggatatattgttagccttgggtggcgttggtgcttttggtttccttccattattgctttggtaggtgcggtgggactttggtttgctctgcgcgacacccctcattctgtgggtttgccagaacttaatcaaaagggagccggcgaagctaaggaagaatcttccaaggagtttaaggcttttgtacggaaacatgtttttggaaaccccactatttgggtattagcctttgctaatttctttgtgtatattgtccgttacgctgtgctcgattggggacctacccttttaggagaatggaaaggcatctccattcaacatgccggctggatggtcgctgcttttgaaatctccggtattttggggatgttgacggcaggttgggcgacagaccgcttctttggcggacgcggaccacgagtttgcgtgctttgtatggctttggctacggtgtttatagctttattttggggattacaagaaccttcgatgtggttggctacatgtttgctcggagctgccggattctgcatttatggtcctcaggcactcgttggtattgctgcagccaatatagctaccaaaaaggcggcggctacggccgttggctttacagggttgtttggttatgccagtacgttggtttcaggttggggattaggacttttggctcaacattatggttgggatgtagcggtcggtgcgttgatcttaatagcagttgttggtactcttatttttatggctgcatggacggctaaagcgaatggatatgatgaaggtaattgaagggattgaaaaatggatataaatgaaataatattggaaaaggttcgccgagtgaagcatgtagctttagatatggatggaactatttataatggagggacgcttttcccttttacgattggttttttagataaaatgaaggagctgggtattggctattcgtttttgactaataatccttcgagaagtactaacgattatttgaagcatttgaatgacatgggaattaaggcttcaaaagatgagttctatacgtcagctcaggctacaatcgattatctccgtttgtatcgtcctgattgtaatcggcttttcattttggggactccaagcatgataaaagagtttgaggaggctgggtttgagtctacaatggacgatgcaaatgatgagccggatgctgttgttgtaggatttgatatgtccttggtatattcgcgcttgtgtcgtgctgcgtggtggattaatcagaagaagttttatcttgcgactaacccggaccggatatgtccgactgataaatctttggtgctggttgattgcgggtctatttgttcaagtttggagcatgctaccgggcgaaaaccggatatggttatcggcaagcctgatcctcgaatgttgaacggtatcatggagcgtcataatctgcaagctgaacaaatagctatggttggtgatcggatttatacggatattcttatggcacagcgggcaaacgctctgtcggtgttggttctttcaggagagacaacgtataaggaggctgtggctcttcagcctaatccggatttgattatgcgcgatttggcggaatttcaggaaatgattttattagcacatagtacgttttaatatatgagggtagaagtttttttgcgtattatttttctcgataacaggtaaatacggtttgttacaggcggttcaaccgcctgtaacttttttatttaaggctttgcagatgaatatctggatgggtggttctaaggtggatggggcggttggtatgattgtcgatgaaatcattcattcggatgcggacatcatctttcttaatgaactgcgggattatcggggagaaaattttatttcttatatggtaaaggagctgaaccggcgtggttatactttttatgggaagaacagtcctttgtcagtaggagtgctgtcgcgctttccgattgatgagcaggaaacagtctatccgcgtgtaaaaggagaaaaaggtgcaattttgcgtgtattgcttactgttgtcggtagaaaagtaacggtgtatgccgctcatctggattatcggcattatgcttgttatctacccagaggatatagcgggagtgattggaaaaagatagctaagcctgtgttgaatgaggaggatatccttgcaatgaatggaaagagtgaccggaagaaagcggttgaagtttttttgcagcgagtacggttggacattgaacagaaacacaccattctactggcaggtgacttcaatgaaccgtctcatttggattggaaagaagatacgaaaaagttgtggggacataatggggcaatagtgaattgggactgttcccgtatgctctatgaggcaggtttcagggatgcttatcgttcggtttatcctaatcccgtcactcatccgggctttacgtatcctgccggaaacaaatgtgcacctgtggctaaactgacgtgggcgcctgaggctgatgaacgagaacgaattgattttatttattattacccttccccgtttttggttccggaagaagcttggattgtagggcctgtacattctgttgtgaaaggaaaaatgaaaaaggagaggagttcggattgttttattcgccctaagagagggtggcctacagatcataaagctgtgatgctctcttttcgcgtttctgggctacattcggaaaatccttgcaatatgaattgaaaaaaacatggaggtgtgttaaaatagaattcggctatcattctaaacaacagaatgatagccgaattctattttgatataatcctgagtaagatctttttctccattaatgttatttggtccttattttacataagatggctgaagtagcgggcatttgaaggcgtgtttctcctttttttgttttaatccaatagctggaagttgttcctgctaaccattcaatctttgagttgtccggcaggttgacggctgtctccgctttttgcccgctggggtttaacgcgatgaaatattgttcatcgcctatccatctcatgtatgcaaaagggtatggctgttctatgtcgctaatagctttccagtcgcctcttgtgccaatcgctggtatgttctttctgacttccagtagagtgcgtacataattcaagatggaagtacggtcgttttcttgcgaggctacattggggtaattgtcggcagggtctatcggcaaatagatttggttggatggtgcggatgaaaatccggcgttcaatcctgtttcccattgcatgggagtgcgacaactgcttctgttgcgtgcgctcttactcccttctttgtaaggggcttcttccaggtttctcatacctatttcttcaccatagtatatgatgggtggccaaggcatagtgagaaagagggttaatgctactttgagttcttccggtgtgttgcgttgcaggcggttcagtcgccatatgtcatggctgcacgtaggcatggtggcatatcccaggtttctggttgcttgatattctttgccataattagttacaaactctttgatttgtccattgccggatttgtcgaagtagcagttgtttggttttcctttgtcgtctgtgttgcagacaaggtttcggtatattttcactccgttgtgaataataaggtcgatgttgaatccagctttgatagcttcatgcggcatactccattccgacatcatgattccttccggatatttcttgttgaaccagcttaggagctcgtcccacaactgcatggtggctgtgtggttgcggtcatcgcgtttgatgaggctttgtgccatgtctacgcggaatccgtctactcctttgtccatccagaaagcaatgatatttttcagttcgcggcgaacagcttgtggtccgggagcattgacggactgttcccagggatggttgggattgggttgggcaaatccgtaattcagtgcaggttggcagtcaaagaagtttttcatatagtatccgttgcgtgctgcgtctggtgcgtctacgtactttttgggtttttgttttttgtcggttgtccaaatgtagtaatcactatgttgcaggttggtatcagtctgcttggactgtaaaaaccatggatgcttatccgaggtatgtccagccacaaggtccaaacagactcggatacctttggagtgtgctgtctgaataagtgctgtcaatgtttcgttttgaccaaaccggggatcaatacggtaaaagtcagtgatgtcgtatccgccgtccttgaattcggaagagaaaatagggctgagccaaatggtgtttactccgattgaacggatataatccagtctggagtgaattcctttcagatctccgatgccatttccgtcactgtcttgaaagctgctgggatatatatggtatatgactgcgtcttttagccattcgggacctttctgcgagaaagcttcggtagataaaatgaagcataatagtaaaaataatgtttcttttgttttcatattatttcgattattgatgatttatatatcgcaaatataataatttgtggaagatggggcagataaatactctttgaaattgcgacttttaacttttattggacgtctctcttgttgcgtttagctttgcttttaatggttttgtattgcgtttatgtttcatttatgtttctttttctttaatatttatccttattccgtgtttttcttttcgttttcttgctgttattttcgtttttttatttgctgtattgttttttatatttatatttgtcgcggaaagttatctaaatgaatatgacgacagattaaatttcgtttataaatatctgatattaattattataatatataagactatgaaaacattatgcagtatggcactaaagacagtgctactttgtgcttgcttctcttctgtgttatttgcttgtgaagatggtgagacggttgaacctactgaaaaaaagcctttggtttttaatgagccgtattttgagaaactttcgaaacctctttccgaagatttgatttacagtaaaggtgtatctttgaaaagaaatgctgttattcagagcatggatattgccaagaacggtgatatttattatgtgcagatagcgggaagcagccagcatcagttgaatgtgttgcatggagcgcctaatgctaccaatccttcggaatgtatggtatttgaattctttggacatggaacgaacatggctgttgaagaagctgccgacggaacttatatttggttagggagtcatggcaataaggggagtgacaaaagttatggcggttcgcagacgatatgccgcgtgaagtatgaaccgggaacaagtgtacagcttgccggaggtgatgtattccatctgaaaggtacccgtaatatacatcctgcaattaatgcggagaaagatttgctgggagtacaatattccaagaaggtgtcgggggttaatacgcgtgtttttgtagcttatcgtttgagtgaagcaatgaagctggctccggtggatgtcgtgctggaacctctgaagtatggcggtgaagatgaggctacaccggagaaaacagtgacgttgactatcaaggcgagagagctttctcagcttcagcctctttatcaatttgcagtttccgacggacatggaggaagtgtaggcgagttggcttttcagggttatgacattgatgagcaattcgtctactattatgagggtatgggatatcttgaagccgatccttcaaaggcttatgtaagcgtattggacaaaaacggccttctttctgcacgaaaggaagtggctgctgttgcagatgccgagaaactgaatgaattcggaatgaccgatcgtgggtatatggaagcggaaggtatcaaagtgaagaatggcacactgtacttgggttttgcatcgagaaaaatggaaggaaaggatgataagcgtctggcaaatattttgatttatcgcaataaatgattctggttttaacagtaaagataattttcaaaagataaaatactatgaaacaattcttttttatgttgcttttgttgggagtcgtctttgcaggatgtaatgatgatgtgactcctccgattcctgtgattaaggaatttgagcttacagtgttggataaggcggatgtacccatatccaaagcggtggtaaatatttttatgagccataaaccggatgtattggttatgagtaaaaatacggatatttttggtaaggtgcacttcttgaacctcaagccgggaaactatatttttacggcgatgatgggtgagacggaaatattgaagactgatatggtagtggacgacgataatgctctaaatgtcgctacgatgaaagctgacaattatgaaatgacggtggccgactatacggtcattgtgaagtcggatagaggtgctgctatctctggacgtaaggtagatttgctgaccaaagaggagcaggttgtctataagtcggggttgacggatgagaaaggtgaaatactgtttactaaaatacctttggatgattatttgattaaagtgtatgacgaaacgaatgaggtggcagtacagacagaggctgtctctgttgttgaagacgttgctaaaaatatatccaatgtggagatcgtgaagctgatacatcattcggatattgttattacgggattccttgtggatccgaatggatctgattctccgaaaccggggactgtgtcaggcggtggtttcgctcataaaggcggttatgagtatgttcaactgctggcattgaaagatattaattttgatgagactccgtattgtgtcattacgggtatgaatgctacgaatccggctgataaaacttatcctgccgccttggatggctgggtagaatcgaaaggacaaaatacaaaaactacttatcagatagacataaactccggtagtataaagaaaggacaattcttctatgtaggtggagcaagttatatgattgcaagctattacaatgattggggaagtcctatgatagagaaagatagatggtgggcatacgatttctataataaaagaggtagtaacgataatggagcggtaaaaggcagttcaggtatattcaataatttgaattccgataaaaagacgaatgtgcccgacggaatagcagtgtttaaaggagtgaatatcgataagaacacagtgcctcaagatgttgtattctatggtggtgagtctcccatcagaaaagaagaccgttatctgattaccgacaatgacctgtatcgcactgtaaactccaaaggtgaaccgcaaccttattttggcgatggaacgaatacttggtttgccaagcaaggacataatgatgacggatgtttcataatgatgggcggagaagttacgacaaccgaatggctgaaacctcgtgttggtaaattatacaaactgaatgtgaaagatggtcctgaaagtgtaagtgtaagtgatattgaagctgctgaaggagtaactgtatttgttgataaataaatctgataatatgaaaacaataaatgtgaataaaacttgccgtatagcggtgttctcattggcgtgctgcctggctgcgccttcatgggccgatgatttgaatcggggtgaatggggtgtccgttatgaatcacaagctgtgatgcagaaggaattggtaaaggggtgtgtgcgcgaccagaatggcgaaccgttgatcggcgtaactgtaagagtgcagggaacctcacaaggtaccattaccgatattgacggaaattatagtttggcattgccaagcaaacagaccaaactggaattctcttttataggttataatacagtagtacttacaccgggcagccggaattctttggatgttacccttgaagaggatgtcaaggctttggatgaagtggtggttgtgggatacggtactatgaagaaacgagatttggtaggtgcagtagaccatattaattccgaagcattggaaggacgttcaactccgtcgttgacacgtagtttgcaagggcaaattccgaacttgaatatatccatgcgtgacggtaagcccgatcgcggagcgtcttataatattcgcggtacaacctctattggtgcaggtggagaagcactgattttaatagacggtgtggaaggtgacccgaattcggtgaatccgcaagatatagagagtgtttctgttctgaaagatgcttcttcggctgccgtatatggtgctcgcggtactttcggtgtggtattgattactactaagaatgcgcagaaaggtggcgtgaaagtgaattataatggtagcttctctttcagccagcgcacagtagaacctgatttggtgacaaacggattgcagtggacagatgactttgtagaagcttttgtgaacaataaaggaaccatgcctacttctatcaataatatattcccttatacaccggagtggcacgaagaattgcgtcgtcacgatgcgaatcctgacctgcccaaagtgcagataaacgagaataccggacagtatgagtactttgggaatacggattgggacaaacttctctataaagacgtgacagccgggacagaccactcaataagtattacaggtggcaatgatatagccaacttctatgtgtcgggccgttttttctcacaggatggtatctaccgcgccaatacagatgattaccagcgtggaaactttcgtgcaaaaggctctataaaaatcaagccttggctgagtattgacaataactttgatatgatgcacaagacgtatcattaccctttgatttcgtatgatcagactttaaatatccaacgtaatatggaacagcagggctttccgatggctgtaatgtacaatccagatggaagtctgacgtatagtgctgtctattgtgctgtgggagatttctataatgaaagctcttatcaggaccagacaacactgcaatataagaatacttttggagtaaatattactcctatcaaagatgtgttaaaatttcgtggtgattttacttatgtcaatacggcttataagcgtaatcgcgttttgaattatgttccttacagcaccggtcccgaacagtttgcggaaaagggcaagagccttatgatggataataaggatgaaacccgctatatggcagccaaccttaatggtacttggactccgaaactgggagaaaatcatgctttgtccgtaatgggaggctggaatctggagacttccaataaagataccttttattcggaaagagacggtttccttttccccgacagaccgaattatgatttaatggatggtttgaactataaactagaacaaggtgacaagaactggtcttatgtaggtgtgttctatcgtttgaactatggatataagggacgttatctcattgaaacaagcggacgttatgacggttcgtctaaattccctgttaatgagatgtggggcttcttcccttctgcttcagcagcatggcgcatctcggaagaaaagtttatggagggtactcgttcctggctcgataacctgaagttgagattctcagtcggtgcattgggcaatggtaatgtagatccttataagttcttgcccaccatgagtattgataaaaccggtgtgattgtaggtgacggacaagtgaattatacaagttatccggggttgattcctaataatctgacttgggaaaaggttaccacatatgatgtgggtgtagatgtggatatgtttaaaaaccgcctgacgataggattcgattggtaccgccgtaatacgactgatatgtataccgtagggcctacgcttccggaagtactgggtactactcaacccaaaggcaactatgccaatttaaaaacaaaaggatgggaattgactctttcatggagagataatttcaagttggcaggcagcaatttccattatggagtgaagttcatgttatgggatagccaaagttggattaccaaatataacaatgctaccggtaagttgagtgattactatgaaggttatcgcattggtgatatttgggggtacaacatcgaaggcttgttcaccagttatgatgaaatagctaatcatgcagatcaggattatataaagatttcagactctaagatatggcaacccggtgacttgaaatttgctgatttgaatggagacggtaaaattgataagggtgcacaaacgctgagcgatcatggtgacttggttattgtcggcaatgaggaggaacgttatcactacggtttcaatttgaatgtaggttggaaaggcatcggaatttccgctttctttcaaggtgtaggaaaaagagattggtatccgggacaggaaacaggatttttctggggcaagtacaatcgtccttacggctattcgctgaagatgcatgagaaccgttggacggaggagaatcctaaccccaacgcttattggccccgtttggtgggatattcttctgaaaatggcggacgtccgatgggaacgccaaacaaccgctatatgcaggatgcttcttacttgcgtctgaaagcgctgactgttgattattcattgccgcaagcatgggtgtctaagttaggactgaccggattgaagatttattttacaggcgaaaatctctttactttctccaatatatgtgagaattttgaccctgaagttatcaagggcggtgatgtcgatttgaaagaccgtaaaggtgaagaacaaggatatagttatccgatgctgaaaacgtatacggtaggattgaatgtttcattctaaaaaagagggaagattatgaaaaaaatatatttatatgcaatggcattgggactgatgttcgcgtcgtgcgaagattttttgactgaatatccaaaaaataagataacgcctgacgatttttttaagacagagcgcgagataagtctttatgcaaattctttttatgaaaaagatatgccaggagttggtgtagctaccggagacggtgtagccgatattatggaggtggtttcggtaagttcgtatttgacctcggggtatgggcccgacaatcaaggcggatggagctggagtgacttacggaatatcaactatttcattgaccgcttgaaacagtcgcctgtaagtgatgatattaagaataaatatatgggattagctaagttctggcgtggcaaattctattttgagaaagtgaaaactttcggtggagttccttattatgattactgtttagagcctgatgatgaagcattgtataaacctcgtgattcaagggagtttgtaatggataaggtgttggaggatttgaatgaggctgtaaaataccttactgacaagaaagatgaaacttgtacaacagtaacccggtatgtggcgttggccatgaaagcacgtgtatgtttgcatgaaggtacattccgcaaatatcatccggaaatgaatctgccggatgctgataaatggatcagagaggctgctttggcggcagaagagttgataaattctaagcaatataaactgttgaataccggtgaagctgaaaaggactatcgtaaattgtttacagcagagaaccgggtaggtgtgcgttctattttggatgagactatttgggcacaggtgtatgatgcagaattccgtcgttggcacgatgtgacatggaagtataactctgcaacgtcaggctctcgttggtcattgactcgttcctttgttaatacttatttgatgagagatggcagtcgttttacggataaggcaggttatgaaacgatgacttttccgcaggaagtaaaagatcgtgactgtcgcctgaagcagacaattcgtactccgggttacaaacgtatagataaagacaaggaaataactgttttaccggattttactatcacattgagcggttatcacatgatgaaatggtctttggataatacattttacgatggccaagcagaggctacaaatgcaatgcctatattccgatatgccgagatattattgatttatgcggaggctaaagccgagctcggtgaattcacttcggatatatggaataagacgattaaattgctgcgcgagcgtgccggtgtcaatggtaaggaaccggaaacggcggatacttatatgcaggaaacttattatccaaatatatcggacaagtatttattggaaattagacgtgaacgtgccattgagctgattgccgaagaccgtcgctatgatgacttgatgcgctggaaagctgctgatttattggctgcaaataggacaaaatgggaaggtatttacatcccgaaagtgaatgaagggtacgatttggacggtgacggaaagaatgatgtatgcttctacaaaggtactaaacccagtattgcaggagttaagtttgtgcagcttggcggtaaccttactctttcgggtgataaaagtggttatttggtttggggagaagcattccaacgggaatgggatgataagaaatatcttcgtcctataccgagaaatgttagagtgataaatccggctttggcacagaatccgggctgggaagaaaattaagtataatatataaattgctgtaatttatataaatgatggttgaggccgggagtgatgcgacattggggtacatctcccggtctctattcttttttttattgattgatgtttgaattattatagaaaaacaatgaaaagagtagaaattatgaaatggattatatttgttagtctgttcctcgttagcggaatagtaaaggcacaacatcttccgcagtggttggaaaaggcggtggtttatcaaatctatccggcctctttcaaagatagtgatggtgacggtatcggcgacttgaaaggaatagaatcgcaattagattatatcaagtccattggagtgaacacgatttggattagtccggtattttcttctgagttttttgatggtggatacgatgtgacagatttctattctgtggatgagcgttatggaacaaattctcagttggtgagtcttgtacagaaagtacatgaaaaaggaatgaagatttttatggatcttgtagcagggcatacttctgacaaacacccttggtttttacaatccaagcagtctgatgcgaatttacagtatagcgattatttcatttggacaccttcaaaaacggaaaaaccgaaacagtttgtctctacagattgtgagcgcgacggtaattatatgaagaattttttcgattgccagccggcactgaactatgggtatgccaatcccaatccggagcatccttgggaacaatcggtagatgcccctggtccgcaagcagttcgacgtgaattgaagaatattatttctttttggatggacaaaggtatggatggctttcgggtggatatggcatacagtctgataaagaatgatccgaagcatatcgagacaagccgtttatggacaggtattagcacttggttcaaagaaaaatatccagagggagcttttattgccgaatggggagagccaaccaattctattggtggcggattccatatcgattttctgttccatatcggacgaaaggggtatacttcccttttcttcaataagaaaaaaacggaagatatcaattgttatttcgggttggaaggagcaggacaagttaagcagtttatagaaatgtaccaaaaagaatatggaaagacgaaaggaaaaggatatatctctctaccgacttccaatcatgatatatggcgtctggcttgtggaaaacgtacagatttgaaacagttgaaagtagcaatgactttcttattgactatgccaggagttccttgcatctattatggtgatgaaataggtatgaagtacattgaaggactgccagatgttgaaggtagtgtacttgcttcgcgaaatcgtgccggaagtcgcacgccgatgcagtggaacgggtctgttaattttggcttttctactgctcccgcagaaaagttgtatattccggttgacccggaagaggatgcccccactgtggaacaacagcaggcagatgagaactctttgctgaattatgtacgtgatgtattgaaattgcgtggttcttccaaggccttgggaaatacgggagactggaagatgatcagtaatgtggagcagccttatcctttgatctatttgcgtgaagcggatggagaacgttattgtgtagctgtgaatccaagtgctaagaaagtggcagctaaatttccggcattcaagtctggaaaatgggaaatagtgataggtgataagaaacaggtaaagtataaagcaggcacaatagaagaccgcataaacatgtcacctgtatctgctgtgattttcaagattaataaataatagtatcatgaaaaaacaactgcttatttctttttttgcattattatctttagtgtgtataaatgcggagaataatagaacaattcgtatctctaccgataatatagatttgatacttcaagttggagaaaatgggcgtttgtatcagacttatttaggtaagaaattgttgtatgaacgagatgtacgggattttccatggaatgtatatgctgcctcggacggtagtgtcagtaaacgtggttgggaggtgtatagtggctctggcaatgaagatttttttgaacctgcccttggtatcagtcacagtgatggaaatctttctactatattatattatgttacttcatacaatcaaccggtggaaggaggtgtggaaacagtcatacagttgcgcgatgatcaatatccggtagatgtaatcttacattatgtagcttatccgaaagagaatatcatcaaaacttggagcgaaatcaagcaccaagaacggaaaccgattattttatctacttatgcttccacaatgctttactttaataattccagttattatctgactgaattcagcggtgactgggctaaggaagcgcatatgagcagtcagcaattgcaatttggtaagaaagtgatcgataccaaacttggaagtcgtgctgccatgcatgcttatcctttttttgaagtaggattagaccagccggtcaatgaacatcaggggacggttctgatgggtactttagggtggaccggtaactttcgtttcacctttgaagtagacaacgtgggcaatttgcgcgttattcctgctattaatccttatgcctccaactatgagctgaaggctggtgaagttttttctacgcctgagtttatttttactttaagttacaatggcacaggagaaggtagccgaaactttcacgaatgggctattaattatagtcttaaagatgggcaaaacgaccgcatgacattattgaataattgggagaatacaaagttcaatttcaatgaggaaatacttgttaaattgatgaaagaggctaaatatttgggagtagatatgtttttgctggatgatggatggtttggcaataaatatcctcgtaagaatgatcgtgccggtttgggagattgggaagtaactcaagataagcttcccggtggaatatctgctttagtgaaatcggctgaaaaagcaggagtaaaatttggaatttggattgaaccggaaatggtaaatccaaaaagtgcattgttcgaaaagcatcctgactgggctattaaattgcctaatcgagaaacctattattatcgtaatcagttggtattggatttaagtaatcccaaagtacaggactatgtttataatgttgtggcaggtattttagaggagaatccaggtgtagctttctttaaatgggattgcaatagcccgattaccaatatctattctccttattggaaggagaaacaaggacagttgtatattgagcatgtgcgtggtatttataatgtcttgaaacgtattaagaaaaactatcctgatgtaccgatgatgctttgttctggtgggggtgcaaggtgtgattatgaagcattaaaatattttacggaattttggtgtagtgacaataccaatcctgtggaacgtatttatattcaatggggtttttctcagttttttccggctaaagccatgtgtgcacatgtaaccggttggaacaaggcagcctctgtcaaatttcgtacggatgtggcttccatgtgtaaactcggttttgatataggattgaaagagcttactaccggtgaaattgcttattgtcaaatggctgtagccaattggaaacgcttacaaaatgccataatggatggtatgcaataccgtttagtttctccgtatgaaagtaatcatatggccattaactatgtaagtaaagatagggataaagctgttttgtttgcctatgatatttatcctcgttttaaggaaaaactaatgccggtgaagctacaaggattagattcgaataaacaatatagagtagacgaaatcaacctgatgcctgctacacactctaaattgaaagcgaatgggaaaatttattccggagactttttaatgaaagttggattaaatgtgttcggggcaacaaatcttcgtagtcatgtcattgagctgacggctcaatgacatgcttttttgaggactttcttgagatgtttttagaacggagtaactttttttatatctttatataaatctgtatttgagagaagacagaatttgtttaatgaagcaattgattgaataataattttttaataagcagtaagtagaaaatgttcagctactgatctgcgtaaatagttagtaatgagaaatatttttttgacaatcctgctatgcgcttgtatgtcgttggctgcacagaataatggctggaaattgactgctactgataccggcgcaacttatgtcggagctccggtagccaatggcggtatcgggatattaccttggaaagagcctttttcggtgcggcatgttgttttgaaccatgtatttgagagcggaggtaggcatggcgtcagtcgggtattgcagggcataaacccttttttgctttcactgaaggtggatgatgtgtccgttgaggagaagaatattaccggttggcggcaagagattgacatgaaagctgctgcccacatcacatcgtttgatgcgcagaataaggtaaaagtgaagtatagtattcgtgcgttgaggaatatgccttatgccggaatgattcaggtagagataaaggctctggagaattgtgcgatacaggtgttgcagcgaacggaagttccgaaagaatacggtgtgctcgatactgtatataccaagatgaaaggcgggcaagccgggcagtatgttgtgagtgtcagtgcgccttcccggcatggtacgcatagggtaacgggttcggcaggctttgtttatgaaaagaatgcgttcaatttccagttgttgaaagaagcgggtgctatatctatcttccgtacattgcagaaaggagaaaccgtaaagtttgctcttttgggtacggtatgctctacccgggactttgctgatcctttcggtgaatccgtacgtcaggtcgtttatgccaattatgaagggacggaccgtttgctggaagcacatcaggctgcttgggacaaactttgggaaggggatgtgattatagaaggcgatgaggaggcacagaaacacgtgcgttttgccctttataacctttattctttcggacgtgagggaagccgcttaagtattccgcctatgggactttcggcgcaaggctacaacgggcatatcttttgggatacagagttgtggatgtatccgccgatgttattactgaatcaagggatagcccgttctatgatggattaccgtaccgatcgtatggagggtgcgattcgtcgtgcttatgcccatggctataaaggtgtcatgttcccttgggaatcggatgataccggtacagagtccactcctgtatgggctttgaccggaccgtttgaacatcacatcacagccgatgtggcaattgccgcctggcattattattgtgtgacgaaagaccgtaagtggctggtcgatactggctatcctttgctgaaagaagttgctgcattttgggaaagtcgtgtcaggaagatgcccgacggcagttatgcaatagtcaatgtggtgggagccaatgaatacgccagcggggtgacggataacgcgtttaccaatggtgcggttgtttgcgccttgaagtatgcggtgagtgcagccgaagcctgcggggaagaagcccccaccgtatggaacgatattgcggagaatctgcgctttcactcgtttggcaacggggtgacgaaagagcatgaaaagtataagggagctatgattaagcaagcggacgtcaacctattgggctatccgttggaggtggttaccgatcctgaaactttaaagaaagatttggagtattatgccgggaagatagatccgaagcatggtcctgcaatgtcctattccgctttctgtgtacagtatgcccgtttgggtgatacgaataaagcctatgaaatgttccgtcgttcttatgtccctaatttgcgtccgccctttggagtgttggcggaaactcctaccagtcagaatccttattttgccacaggtgcaggaggattgttacaagctgttatcaacggctttgccgggttgaggataacggaaaacggggtggtgcaactgccttcggtattgccgaagcattggacgagggtggtcataaaaggagtgggtcctgaaaaaaaagactacgtaagagaacgaaaatagaatgtaatttgtggtatgtcgcttttaccggaatccctataagtcttcaaaaagaggcttatagggatttgtttttaacacaaacgcaattattgcagaacgaaaaatgttctatctttgctccgcattaataaataaagggttattgcaatgaaacaggttataagaagacatgtaactgtactgctggtcatatttctagtaagtacagtttgggcgcaacaggcaaagtatgtattttatttcattggagatggaatgggggtaaaccaagtgaatgctgctgagatgtatctggcggaacaggaagggcttattggagtaaagtcgcttttgttcaccacatttccggcaggtactgtggctacaactttctccgccactaattccgtgaccgattcttcagcagccggtacggcgcttgccaccggtgcaaagacatacaatggggctattggtatggacgatgatgaaaacgccttgcagacagttgccgagaaagccaagaaagcaggcaggaaagtcggtgtcactaccagtgtcagtgtagaccacgctaccccggcggcattctatgcccaccagcccaaccgtagcatgtattacgaaattgcgcttgacctgccgaaggccggtttcgacttttacgcaggcggcggtttcctgaaacccgctacgacagccgataagaaagatgcgccgagtatcttccccattatagaggaagcgggatataccattgccaggggattggacgaatacaaagcaaaggctgcggatgcagggaaaatggtgcttatccaggaagagggtgccgtaccttcctgcctgccttatgccatcgaccgcaaggaaggtgaccttaccttgccggagattaccgaaagtgctatttcgttcctgacaaaaggaaacaataaaggattcttccttatggtggaaggcggtaagatagactgggcttgccacggcaatgaccctgccaccgtttttgaggaagttatcgatttggataatgcggtaaaagtggcttatgagttctacaagaagcacccgaaagagactttgattgttgtgactgccgaccacgaaaccggcggcatgagtctgggtaccggaagatatgagttgcgcctgaaagcattgacgaatcaggaacagtcgcaagaccttctttccaaggcaattaccgatttgcggaaagattccgacaaggcttcctgggaggaagtgaaggcgctgcttgccgataagatgggattttgggaagagttgcctttgacttgggagcaggaaaagatgctccgtgatgaatacgagacgtcttttgtgaagaataaggttgtctttgaagagagcctgtacgccaagaccgaacctttggctgctgctgcccggaaagtgatgagccagatagcaatggtaggatggaccggttcgggccatacggccggatatgtacctgtctttgcaataggtgcgggctccgatttgtttgtcggtaagatggataatacggaaattccgaaacgcattgcgaaagcggcggggtataaataatctcctttaaagtcggtcacctcaggcggtacggattgacgccctttcaagtttgggttgaaaaggctctgtatcgcctgaggtgatttttttatttcaaatcttctttgattacttcatccatttccctgataagttttttccgctctttggcggatttcactttcttgtctttgcagccggggtctgtacgttctgaaacctcttcgctccattcttcaaatttattctctgccgggcggccgttggggtcgatgttctcttcggcaatggaattgtttctgtaaatcatatcatccataacgcttttgtttttaatggttatgacgatactacaagcaaccgggcaaaaagttccggtttttcgttctttttcgtaatcgtttataagaataaacgattcttgaaaggcggggcaagtggtttacagtttggtttccccttcgataaactcttccagaaacaggttctcgccgtcgaatacggcataggagaaatagtttatccagtcgccgaggataaggacgcgggcggtggcactcagcatcaaatccagttcgatgtgccgatggccgtagatgaagaagtttatattcggatggttcttcagatactctttggtatacagtacaagatgctcgttgttttcgcccatgtagtcgggctctttcccgtctattcttttcaggcggctgtgctttgcccacctcagtccgaactctacgctccagcgggggtggagggtggagaacagcgtttggagggtacggctgtgaaacatggtacgcagcagtttgaattttttgtccgggtcgcccaatccgtcgccgtgggcaaggtagaactcttttccgtagatttccgtggtgaggggttcgcggtgaatgactaccccgcactcccgggtaaggtaatccccgcaccagatatcatggttgccggtgaagaagtgtacttccacgcccatatccgtcagttcggacagcttgccgagaaagcgggtgtagcctttgggcacgaccgtgcggaactcgtaccagaagtcgaacatgtcgcccagcagatatacggcggctgctttgtgtttgatactgtcgagaaagttcaccaaccgtcgttcctgtgtacgtccgtgctcgatggcccgcgaacccaagtgtgcgtctgaaaggaaatatacgttcttcatatatgctttgttacgttgtcagttagagaaagcccagttccagcttggcctcttcgctcatcatgtccttgtcccattcgggctcaaacaccaggttgatggtggcggaggtcacgccgtctatcgattctatcttctggcggacatcttccatgatgaagtcggcggcggggcagttgggagctgtcagggtcatgtcgatagtcgcctcgccgctgtcggcaacatctatcttgtagatgagtcccagatcgtacacgtttaccggaatctccgggtcgaatacggttttcagcatggctacgattttttcttctatttcaaatttggtcatattcgtacggtttgttggtttagcgaagcaaatctaaagattttaattgaaactacaaagaatgtgcaggctacattacagcactccttcgtcggtaaaactgtaatatctgccgtctgtgactataacgtggtcgatgaggcggatgttcatggtctgtgcgcctttcagtatgagctgtgtcagttggcggtcgttcgtgctaggctgcggatttccggagggatggttgtgtatcagggcaatctgtgtggcgcgttgcaacagggcttcgcgcaggatgctcctcacgtcggcgctggtctggtcgatgccaccccggctgatgcgtactttgtctatgacgcgggatgcctggttgagcagaagtacccagaactcctctacggtgaggtcgcacaggagcggatgaaagattccgtagatgtcatcggacgagtgtatcgcgacccgttccgaacgctcttgccggtttctgcgtttgcccagttcgagggctgccatgatggtgacgctcttggctggcccgatgcctttgaagcgggagaaatcgtggacttcccatttgcccagccggttcaggtcgttgttgcagcaggcaagtgtccgttgcatcagtgccacggcgctttcttcagtgtttcccgagccgataaggattgccagcagttcggcgtcgctgagggcttccgctcctttcagcatcattttttcccgtggccggtcttctgccgcccaccggttgattgtcagttttttcatctttttttcattaccggctgccagcacttgtagcctgttatttatagaaattcttcttgaatgcctcgaactcatctttgccgcatatgcaacggttccaccaggcacgccagaaaccggttccgtatccgatgagctggatgaaggcggcggcaatggaatagacgccgatgcgcaggctcttgttccgtagcgtggagtccgtgcatacaagcagtgcgtacaatgcaatcggcagcaggctgtacaggcagaaaggcgctcccgccaacagcacggctacgcccagtgtaaatgctgccggcagcagatgcaccgtttttagggattcgggatattttttgtagaggttgatgcgggcgatgccggagttgtgcacttgcttgaagaatttcttcaagtccgtccgccgcttatgatacacccatgctccgggaaagagcctgcatgcgtacccgcccttgaagatgcggatactgaagtcgatgtcctctccgaaacgcatccgggagaagccgccgagcgtttcataaacctcgcgacgcactcccatattgaaactccgcggatagaatttgtccattttcttttttccgccgcgaatgccgccggtggtgaagaacgaagtcatggagtagttgatggctttctgtatatcggtaaaggagacgtgcgcacggtccggtccgccgaatgcatcggcaggggctttttgcagttcctcttccactgctgcaaaatagccttcgggaaggatgcagtcggaatccagtataatcaggtattctccccggctgcgttcggcgccgtaattgcgcgtttgtccgggaccggagttgggtttggcgtagtaacggatgtccagaatgttctgatagcgctctgcaacgtccttgcagggaaccgaagaaccgtcctctacgataatgacttcgaaatccttgaagctctgtcgcgtgaggctttgcaaaagctcgtccgcttcgtcggggcggttgtatacgggaatgataatggaatatcgcatgtctctgtctctttttatcgggttacgggagttgatgttgcaaagatacgtttttatttggtgatagacggttattttcccgtgcattcggactgttattttcggttcattctctctacaaagtttaaaaatgaaaatcatctgttacgttatcacgctacaggggtatgcctttgattacaagtgtgttgtgccgtgatagataggcacggaagatgaaattgtttacaaatatctatcacggcccgtatgtctttaagagtggactaagccgtatgtgtatttatatttgatagaataggtaatgtgttggttctcagtgtaaaacatttggatttatggggaactaattgttttagcaggagaaactattggtttgcccctttaaaacttgtagttctatgtagtcaattatttccctgcttccgtatggcttccagcgtcatgttctcctgtaatttcccccgtttgttgtatctttcttcctttacgatacctacgcctttggcataccagctcatgctgtattctttttcggagaaaagcatgaatttggctttggattctgtatagattttaatgcagtcgaagtctcctgccggagtatgcactctctcctttcccttgtatttcccttcgagggaagctttcattctcataggtcctattttttgcgtatacttgcagggaggaagttcttcgtccatgccagcattttctttgatagggatgcttatgcgtccttcggcatgcatgtatttgctgtactcgtcatactccttttcggctctggaacggtctttttgagagtacttggaaaggtagtccagttttgcctctgtattctctacctctgcatccagtgcgatgaattctgtgatgccggtctttttgcggtatatgaatgtttcccggttcgtaccgtctataatctgagtcgggctgtagctgtcgccataccaccgtaagtctactacaatgcgttcgttctcgtgaatgacgtctcttactaaggctgaatctttcagggttttctcttgtttcttgtcgatagtggtgtaatgaagtacttttcctatctctgtacagcaatattgggcactgataggaataaaattaaataaaaataaaaataaaaaaaacaggtcttctttcatggtgtttttttaaataattttttatatattaggtaaatataattaaaaataatcaattatgaaaaacttgttagtgaaaatcctgtttgttgttgtaggacttgtaatcggttcttgttcgcaaagtgaaatagaggagcaagtcttaaagccaagtgttgaacaagttcaaatggaagaactaattcaatatgtggaagatataaaaccttatgtgtctgctccgcttgatgtgcacactcgtggcttttggagttcttttagaagctggtttaaaaatctaggaaaagctgatgccggtggctatagatggggacgtgataatggaatgaatttttggagaggacttcgtgtttctttaacaacatctttggtaacggcaataaatggggggatgctcgaactgcctggaagataaatgatgaatggaaagtgtattctaactcttcaaggcaacataaagagttgggtaatagtcataatagggctatctatgaactttgtcgggagaatccaacccttagatatggcagtaatatcagtgattctgctttgtcatcgatgattgaaacgaaacttaagcagatggggtatagtgatgttggtatatcttctttagaatggggaaatataataattcttataagaaatttgaaaaatgcacttaacacgtcttcagatttgaataatgtttttattgcaggaatttcaagctcaccaactttggactatcagtttttggatgaatatttagattctgttcttttgttggaagatagagaagaaatgattacttttacgaaaaaatatatacaaaaatagactctttaccaggggtgaaaaaagagttgttaaagggaatggtttcgattgcattgtgcagtataaacctttgggttcctgtttaataaacatctcttttgagaaaaaagccgtctgaatgagtgctcagtcaggcggcttttaatattcttaagagaaatgattcctcttatgcttttacgcggcttacgtaagaaccgtcgcgagtgtcgatttcgatagtctcgccttcgttgatgaacaacggtacacgtacggttgcgccggattctacggttgcaggtttcagcgtgttggtagccgtatcgcctttcagacccggttcggtgtaagtaatcttcatctgaaccttcacgggtacgtcagcatacagaacggtttcggtagaagcatcggacacaacgtctacaaccattccttcgagcaggaagtccacaccgttaatcaggtcgtgggcgatgggaatctggtcgaaagtttcctggttcataaactggtagttgtcaccgtcgtgatagagatattggtgcggacggcgttctacgcgtacgtcttccagcttttcaccgatgttgaagcggcgttccagcacatagccgttgactacatctttcagcttggtacgcatgaaagtattaccttttcccggcttcacatgcaggaagtcgatgcagaaataaagcttgccgtccatgcggatgcaagttccgattttaatgtcttgggcattaatcatactttatagtctttattattgttatttattaagatgtttcgctcaatttgcgagtgcaaaagtaatggaaatcggtaaaaaacacaaaaagttttgagataaaaagagttatctcttggttattttagaaaaagtctctatttttgcagcccgattacgtagaataataacataaaacaagatacagtaatgaaaagaacatttcaaccttctaacagaaagagaaaaaacaaacacggattccgtgagagaatggctacagctaatggtcgtagagtattagccgcacgtcgtgccaaaggcagaaagaaactgactgtttctgacgaatacaacggagtgaaggcataatcattccttttaatagagataagagagccgcaaaggactggtaacagtgttttgcggcttttcttttgtgaaactttcaagaaaacatcattgcaatgcgcctaaattgcattatctttgcatcaaaagcgaagataaactgcaccccggcataaaaaatgaacgggttcattttattctgctctcggtttgcattatctttgcatcaaattgtagtgattatgactataaaggaatttttttctttccggcagaacaaatacttctggataaacatcctggcaatgattgccgtggtagtgttgttgatgttcggaacattaaaaggaatcgatatatatacccatcacggcgaggctgtggtagtgcccgatgtgaaaggcatgacggtggcggaagccggagcggtgtttgacagccggggactggcttgtatcgtttccgactccacgtatgtcaaggataaaactgccggctgcatcctggactataatccggctgccgggcagaaggtgaaagaggggcgtatcatttatctgacaatcaatgctatcaatatacctttgcaagtcgttcccgatgtggcggacaacagttccctgcgtcaggcggaagcgcgtatcctggcttcgggcttcaagttgaatgacatccaatatgtgcccggcgaaaaggattgggtgtacggcgtgaagtaccgtgagcgtatgctcgctatcggtgataaagtgcctatgggtgcaacgctgactttaatggtaggcgatggcaacagggaagtgatggaaggcgattctttgtctgcggacgaaagcatggggaacccggacgaagccgtttccgaaggttctgctgccgacgaatcctggttttgatgttaaaggtgtgcgagagtgaaagtgtctttaatccgtaaaaaggacaaacgatgatcgaagagttaccggacgacatagagaatgatgtactggacgatatagaacctgtaggtgacgagtcgcagctttacgagcacttccgcgtagtagtggataaggggcaggagatggtgcgtgtggacaagtatctgttcgaccgcctgaccaatgcctcgcgcaaccgtatacagaaagctgccgatgccggatttgtgatggcgaacggcaaaccggtgaagagcagttacaaggtgaagcctctggatgtgataacggtgatgatggaccgtccccgctatgagaacgaggttattcccgaagatattcccctggatatagtgtatgaggacaagtacctgatggtagtcaacaaaccggcagggctggtggtgcaccccggacatgggaactaccgtggcacgcttgtcaatgccattgcctggcacatgaaagatattcccgattatgatgccaacgacccgcatgtggggcttgtgcaccgtatcgacaaagatacatccggtttgctggtaattgccaagacgccggatgccaagaccaatctcggtcttcagtttttcaacaagaccaccaaacgccgttaccgcgcccttgtctggggaaatgtggaacaggacgaaggtacaatcgtcggtaacgtaggccgtaatcccaaagaccgtatgcagatgaccgtccttccggacgaccaaggcaagcatgccgttacccactaccgtgtgctggagcgcctggggtatgtgacactcgtggagtgtatgctcgaaacgggtcgtacccaccagatccgtgtacacatgaaacacatcgggcatattctctttaacgatgaacgctacggcggtcatgagattctgaaaggaactcattttgccaaatacaaacagtttgtaaacaattgcttcgatatttgtccgcggcaggcgttgcacgccatgacgctggggtttgtgcatcccgttaccggagaagaaatgtactttacctcggagctgccggacgacatgaaccggctgctcgataagtggagaggctatattagtaatagagaattagaatgaaacgcacaatcgctattgtatgcggaggagacacttccgaatttgaggtctccttacgcagtgcacagggaatctactccttcatcgacaaggagagatacacattatatattgtagagatgcgcgggaccgactggcacgtgcagctccccgacggaacgaagactccggtagaccgcaacgacttcagcttccggctggacggtgcgaaggtagtgttcgacttcgcctatatcactatccacggcactccgggagaagacggacgcctgcaggggtatttcgatatgcttcacatcccttattcctgttgtggggtacttgccgccgcactgacgtatgacaagtttgcctgcaaccagtatctgaaggcgttcggcgtgcgcattgccgattccttgctgcttcgtcagggacagtcggtttccgatgaagatgtaatcgggaagataggcttgccttgttttatcaaacccagcctgggcggttccagcttcggtgtgacgaaagtgaatgtgaaggagcagatacaacccgccattgcaaaggcttttgctgaagccaaagaagttttggtagaggcttttatggacggtatggagataacttgcggctgctacaaaaccaaagggaagtcggtggtatttcctattacggaggtggtgtcgcataacgagtattttgactataaagccaaatataacggtgagtcggacgagataactccggcgcgcatccccgatgaactgcgcgaccgcgtacagaaactcacttccgccatttacgacattctcggcgcttccggaattatccgcatcgactatatcattaccgaaggagaaaagataaatctgctggaagtgaacaccactccgggtatgactgccaccagttttatcccgcagcaggtgcgcgcggcgaacctggatattaaagatgtgatgacagatataatagaaaaccaattttagatattaactattaggtatcaaccggctatcagatgcccgcttgttagtcttgaaaccaaatacttattgtttaaaatttaaaattgcatatcatggaatttgaagaaatccgcccttatcatgacgaagaattacctcaggtttttgaggaattgattgctgacccggcgttccaacaagtggcttgcgccgttatgccgggtgtcccttttgaagctatcgcgcaaaagatgcgtgcaagcaagaccaagcaggagtttcaggaaaatctttgctacggcatcttgcataaattggccaaagatactacagacggactgatattggagagcatggctgtgctgaataaacagtcggcctatacctatgtctccaatcatcgggacattattctcgactccggttttttgtctgttctcctggtggagcagggattggacaccgtggaaatcgctatcggtgacaatctgctgatttacccctggatcaagaaactggtgcgcatcaacaaatgtttcaccgtacagcgtgcgctgaccatgcgccagatgctggaatcgtccatacggatgtcccgctatatgcactacaccattgcggagaaaaaacagtctatctggattgctcagcgcgaagggcgtgcaaaagattccaatgacgttacgcaggacagcgttttgaagatgctggcaatggggggcgacggagacattatcaccaatcttcaggaattgaatatcgttccgctctccatttcgtacgaatacgacccttgcgactatctgaaagcgcaggagttccaactgaaacgcgacatacccgactataagaaaaccacggatgatgacctgctgaacatgcagaccggacttttgggatataagggccgcgtctgtttccgtatggcatcctgtatcaatgaggatttgggtgaactggagcggacattgccgaaaccggagctgttcgtagccatatctgctttgattgacaagcgtatccatgccaactaccgtatttttgccaccaattacgtggctcacgatttgctgtataaggaagaacgctttgtagagcattataccgcagaggataagaagcgttttataagttatatcgacggacagttggaacgtatcacccttcccaataaggatgtggacttcctgcgtgagaagctgctgctgatgtatgccaatccgctgacgaattatctggctgcaaccaaatgatgtttttgccgtgcgccggagtggaattgtaacagtttgcgtggtaagtatgaaaaaacattgctatagtctgcttgtcgtcctgctgtcgtgtctgctggcatcgtgcggggacgatgattaccgctatccttccgtgaagcaggatttcctgactgcattttccggaacggacgggcggctggaatcggtgctgaccgatgaaggtgagcggcttcggattgttgaaggcgcatcggggctgcgtgtaagtgcggacacggccattcgcatcgttgccaattacgagacattggcaatcggggacggcgatgttgcgggcgcaaagctgtatgctttgctgcaaacggtttctcccgtgccactggctgccgcagagtttgaggagggcgtgaaaacagaaccttcggagatacagagtatctggcgggggtatgattatctgaatattatagtaaaggtaaaacagcagggcaagcatcttttccattttgtggaggatgaggctgttgtggatgaaaacagcggacgtgtcaaggtgcggttgactttgtatcacgaggtaagcagcagtgtgcaggattatggcaagcgtgcttatctgtccgtccctttaaagcaatatatgaccgaaggcgtgcggggggtggatgtccggtttaggatttatacttattccggctgttttaagacttatgttttggacgaagcggggcttcgtgtagaggaaggctgattttatacattatatatatagataagaaagtgtatcaaagtggggcgggatttatatgccggtgctttgatacactttcttgtctatattcagatgctgttgtgatgaacgctgtcggcaattgtcacttcaatgcccatttcttccaggcgtaaagcggtggaaggcgggatgtgtgagtcggtaatgatgtggtctacatcttccatatcggcaatcttgctgaaacctctccgtccgaacttggaggaatccgcaagcactatcgttttctgggcggtctgcatcattacgcggttgaggctcgcttccatcatattggtagtggtgatgccgaagtcgaggtcgatgccgtctacgccgataaacagcttgctgcacgaaaagtctgccaatatgttttctgcatatttccctaccacggacagactgctgtgccgcaatatgccgccgagttgaataatatagatgttcttttcgcttgccaggatattcgatacttccatggaagcggtaataacggtcagttcatctgccggaacgatgctgcgggcaagtgcgtgcatggttgttcccgatgctatcaatatggaatctttgggagtgatgaggctggcggctttcattccaatcagtctcttttcctcgacatacagcttttctttctcactgacgttccggttgtcgatgtaagggtctatcaaaatagcctttccgtggtttcggtacagtttcttttctctttcgaggtctgttaaatccttacgtatcgtaactgacgaaacattgaggtgtgtggctaaatctgttaccaaaatagaattatgctgtatcaacaactccagtatgatagattgtctctcttcttttgtcataataggccttaaatagtattcaatgcgctaatatagctgaaaaaaacagtataaagaaactcagaatgctaagaaatgataaaatgtttgtccgataatattcccttttgaaacgtaagtataatctatgcttacaggtatgaaacttcttgcctgaagattttttttctgttattcagtgaaaaaacagcgaaaaagtttcgtggttataaaaatagcttttatatttgttgcgaaatgaaaccttgtttgttttgataagaaagcagcggtgctgttatattaatcttgaaaatcaaactgcgttaactaatattataagagacatgatacttaatagcgagattaacgaatttgacgtcatcattgttggcggaggcgcaaccggagcaggtacggcaagagattgcgctttgcgcggaatgcgcgttttgcttgttgaacgctttgattttgctgccggcgccaccggacgaaaccacggtttgcttcacagcggcgcccgttatgcagtgaccgatagagaatcggcagccgaatgtattaaagagaatatgattctccggaagatagcacgccattgcgtagaggaaaacggaggtttgtttatctctcttccggaagacgacctttcatatcaaaacttatttgtagaatcgtgccgggcagcgggtatcgatgcacaggtaatcgaccctgcagaggcgaggttgatagaaccttcggtgaatcctgcgataataggtgcagtgaaagtgcctgacggttcgatagaccctttcaggctgacgctggcaaatgtcatcgacgccaaggctcacggtgcgaaagtgctggtgtatcacgaagtgaccgcattgattcaagagcagggaagagttgtaggagtcacggtacttaatcataaaacaaaaaccgaacataattattacgcacctctgactataaacgcgggtggtatttggggacatggcattgctgcaaaagcaggcataagggtggacatgttcccggcaaaaggctcgttattgatttttgggcatcgaatcaataatgtagtgcttaaccgttgtcgtaaaccggccaatgcagatattcttgttcctggagatacaatctgcttgattggaacgacttccagccgcgtgggatttgatgaggtggatgatgtgcgggttacaccggaagaggtggatttgctgttgtcggagggcgagaagttggctcctgctctggctacaacccgtattttgcgtgcatacgccggcgttcgcccgctggtggctgccgataatgacccttccggccgtaacatcagccgcggcatcgtgttgttggatcacgaagtgcgcgacggtgttccgggtttcgtaactatcacgggtggaaaactgatgacataccggctgatggcggagtgggccacagacctggcttgcaagaagcttggcatcgacaagccttgcattacaatgaacgaaccccttcccggttcgcgcatggaagaggaccgttcggggagcaagcaggtggtggcggaacagcctaaacgttcttcggtaggccgtcacggtgaaatggctgccaggattgcatcggaaagcaagtacgataacagcctggtttgcgaatgtgaggatgtgaccgtaggtgaagtgaactatgccgtgaacgaacttgatgtgcacaacctgatagacctgcgccgccgcacacgtgtcggcatgggtacgtgtcagggggaactctgtgcctgtcgtgcggcaggattgctgggcgaggcgcataattgctcccaaaaggcgaaagaggatttggcttcgttcctgaacgaacgctggaaaggattgtatcctgtggcatggggcgaggcgctgcgcgaaagcgaatatacccagtggatatatggtggagtttgtggaatggaataaaatgaataaagatgaaatttgatactttaatagtaggtggggggcttgccggtctgacgtgtggcatccgtttgcagaagaatggcgtgaagtgtgctatcatttccaccggacaaagtgcgttgcatttttcttccggttcattcgatttgctcaacgaactggccgacgggacaaaggtggataatccgcttgcggctgccggcagggttggcgcaaatcacccctacgccaagctggacggtaagtttgcatattatgtccgtgaggcgaaacagttgttccttgattgcggtattgaagtgaacggtgatgcggaacgtaatcatttgcgtataactccgatgggtacgttgaagccgacgtggctgacgttctccgacttcacgcaactttcatcgccccatgatatagcaggcaagaaagtgctggtggtcaatatagccggatttcttgacttcaatacgaagtttgtagccgacagttttgagaagtgcggtgctgaatgccgtatatcttctatcaatcttcccgaactggaaagattgcggattagcccgacggaaatgcgttccaccaatattgccagggttctggagaatgacaaaacgcttgagactttaatcagggagttggccggaaaggtatccggctttgacagcgttgctttgccggctgtattcggactgtcgtctgccgcaccggtaagaaagctgaaagaagcgttggacattccggtatggctgattccgacaatgccgccctctgtgccgggcatccgtgcacagcaacagctacgccgttcttttgaagcgctgggcggagtctatatgctgggcgatacggtagtgaaagccgacttcaaaggcaatagagtgcaggcggtatattccatcaatcatggagatatctcgtttgtggcggaaaacttcgtgcttgcttccggcagctatttcagcaatggactggtggcgcggccggacagtgttatcgaaccggtttttggcagtgatgtggattttacggcgggccgcgacagttggtatgacaaatcgttcttcaacaagcagaattatatgacgttcggtgtggccaccgacgacaagttgcggataaagattaagggtgaagtgcagcagaacctgtttgcagcaggttcggtactgagcggctctaatacgatacatgaaggttgcggtgccggtgtttccatgcttacggcattgtttgtagcggataacttaataaaaggatgacgtcatgaatatgcagcagaataatataagcgaaaacaattttgagcaatgtatcaagtgtacggtctgtacggtatattgtccggttattccggtgaatcccgagtatcccggtccgaagcaggccggtccggatgaggagcgtcttcgcttgaagagaggcgaatactttgatgaggcgttgaaatattgtctgaactgtaaacgctgtgaagtggcttgcccgtcgaatgtgaagattggcgacattatccagttggcgcgtatcaaatacagcaagaagaaaccggcattgcgcgatattatgctggcaaatacggattttgtaggaaccatggcatctgcctttgctcccattgtgaataccacattgtctttgaagccggtgaaaatggtaatggacggagtcctgaagatagaccatcatcgtgtgttcccgaagtattcttcccagacattcgagagctggttcaaaaagaatgcgatggcttcgcaggataattacaagaagcatgtaagttttttccacggctgttatatcaactataatttccctcagttgggcaaagatatggtaagcgtgcttaatgcaataggctatggagtgcatttgcttgaaaaggagaagtgctgcggagtggctttgatttccaacggcttgatcaatcaggcacgtaagcaagctgaggcaaatctccgttcagtccgtaagtcggtctttgaggataagcgtccggtcatcggagcttcatcgacttgtattttcacgatgcgcgacgaatacccgcatctgcttggcattgacaatgcggacgtacgcgacagcatagaactggctacccggttcatattccgtctgctcgaagagggaaacgtaaaactgaaattccgtgatgacgtgaagatgaagattgcctatcatactccttgccacatggaaaagcttggttgggcgtactattccatcgctttgttgcgcagtattcccaatataaaccttaccgtgctcaattcccaatgttgcggaattgcgggtacatacggctttaaaaaggagaattacgaaacatcgcagggaatcggcgcttcgctgttccggcagatagaagaagtggctgccgactttgtcgctaccgattgcgaaacttgcaaatggcagattgaaatgtccactccggcaaaggtgaaacatcccatttcgatactggcagaagcgctcgacctggaagcaacccgtaaattaaacagtgataaataatattattcttaaaatcgtagtactatgtggaattttttagcaccacctgctcataagcaggaattaccggcagagaagattgattcggcgtataagagttaccgttggcaagtcttcctgggtatatttatcggttacgcaggtttttatatcgtgcgtaagaacttctcgatggccattccggaacttgcccagtttggttttgaaaagggcgagctgagtatcgttctctctatgaatgccgtagcttatgctttgtccaagtttctgatgggaagcgtgtccgaccgcagtaacgcacgtgtatttcttccgttaggattggttttggctgccgtgtccatgatgtttatgattgtgccggtacagttcttcggcccggaacagaaatcactggccattatcgtaatggctgttttaaacttcctggtaggttggttcaacggtatgggatggcctccttgcggacgtgtcatgacccactggttttcggtgaccgaacgcggaacgatgatgtccatctggaactgtgcccataatgtgggcggtgcattggtcggcccgatggcagtttacggtgcgttgtggttcggttcctggttctatggtgccgacgcatcccgttacttcctcatcggtacgtatgtattcccggcagcggtggctattcttgtagcgttggtggcatattgcctgattcgcgatacccctcagtcttgcgggcttcccactattgagaaataccgtaacgactatcctaaaaactatagcgagaagcaggaagaagtgcttaccgcaaaggagattttcttcaaacacgtattcaacaacaagatgctttggtacattgctattgccaatgcttttgtctacatggtacgttacggatgtctcgactgggctcctactttcctgaaagaagctcagggatatgatatcaagcaagccggctgggcatactttgcctatgaatttgctgcaatacccggaacattagtttgcggctggttgagtgacaaagtatttaaaggcggacgcgcaatgactactatcatctttatggctatcgttgctttgttcatcttcctttattggcagttctccgataactatatagtcgtaaccttgtctctgattgctatcggtttctttatctacggaccggtaatgctgatcggtgttcaggcgctcgaccttgctcccaagaatgccgcaggtacggctgccggacttaccgg

SEQ ID NO: 461 - DNA, 54179 bp, Bacteroides stercoris
  source 1..54179: mol_type = genomic DNA
tttttagagaaaaaagagatacaacatatcatttatgaacccttaatttgaagaaatgcctatgaagcaatgaagagacttagaggatatacagttcattttaccccttaatcctccctttttttacctaactgaaaaactatttttattaacaacaaaatcatcaatcacttatgaatgaagatcgcaacaaaagaggaattaaaaatcataaaatcctcatgacagtggctatctgtgcactgtttcttggcagcagtaacacttttgctgcccgatctacttcccatgaaaaccatggcgtaacagagcagatgcagtctgtcgctgtaaatgttttagtagtagatgcccaaggcgagcctatcattggcgccaatgttgtagaaaaaggtactaccaatggcggcattacggacatcaatggaaaaatcagaatgaatgttaaagcaggagcacttttacagatttcttttgtggggtataccactcaagaaataaaggccactcctaatctacgggtagtgttgaaagacgacactgaattattggatgaagtagtagtcgtaggttacggctcacagaaaaaagagaacctgacaggagcagtcgcttccgttaacgtgaatcagacattggaaggacgtcctattgccgatatcggtcgtggtttgcaaggtaccactccgggcttgtccatccaggtaccaagcggcgaagtcggttctgacccgattattaagatacgcggacaaatcggttccatcgaaggagaagctacacctttgattttgctcgacaacgtagaaataccttctatccaaatggtcaaccccgatgatatagaaagcatttctgtactgaaagatgctgcatctgcttctatttacggtgcgaaagcagcattcggcgtagtattgattacaacgaaaaaaggcgccaagagtgatagggtcaatgtttcttatcagggcaatctctctttccaaaacatggcaaaagagatgaaaatgggacagttcaatgctttggaatacagcgtagaagcgatgaaacgctccgggaaaacagccaccggcggtatttcattctttatgacagaatccggattggagcgtgcccgcgaatggcaaaacaaatatggcggcaagttaggtcccgatgacccttatgtatatgggcgagactggtatgtggatgccaatggacgaaatatcggtctgagaactttcgacccgtatgattatatgatacgcgaatgggcaccgactcactcacacaacgtttcaatcaacggcaaaagtggcaagacaacttacaacatcggcttaggatatctgcatcagaacggtatgatgaagcctgccaagaaagacgattttacacgctacaacgcatccgtacgtttaagcaccgaaatcaacaaatatctgactatacgtgcgggttctatcttctcctcacgtgacaagagatacccttattctacctcattcactactgccgacccgtggctgtacttgtatcgctggggtcctaacatgccgttaggtgtcaatgaagacggaaacgacttgcgcagtccgtggtctgaaacaaaacaagccaatacagcttcacaagtagataattacctcaacataagcttgggtacaaccgtaaatgtgaccaaagactggaaatttgattttgactatacatatgccaacgaaacaggagttatcaagaaacccggaacacgatatagcgcagcaaacgcatggagtgccggtgtgccgagaaccgatgccaacggcaatcagatttatgtaaacaacctgggacaacaagtagacgcagcagccgaaggtgcaatgcccgcatacaaacttccgtatgaagaatatactccccatggttcaaatcccgaccatatctacagaaaatcttcgggagcacgtcgccataccttcaatgcaacaaccgattacaactggcaaataaacgacgataacaacttcaagtttctgcttggtatgaacctggtgacttatgactatgaagacaactggtcacaaattacagatttgacagatatcaccaacccgcagttcgacctcgcagttggcactcagaccgcaagcggaaaccaaaaatgggaaggtcaaatgggttacttcggccgtatcaactataattacaaagaaaagtacctgttggaagccaatttacgttatgacggtacatccaagttcccctctggcatgaaatggcgttggttcccttcattctcagccggttggcgcttaagtgaagaagcttttatggaatgggcaaaacccgcattgaactcattgaagcttcgcggttcatggggtatcattggcgaccaaaccgtagataacggcttgtatgtatcctctctcggcacaggacaagtaaactggctgggtgctgatggtcagaaattattctatcgcggtactccttctgccgttgcttcttctattacatggcaggacatagccacactcgacttgggatttgatgcgcgtttcttccacggtgatttcggtgtaacattcgactggtatcaacgcgatacacgtaatatgattgtaccgggttcgggcattgcctatacattcggtgcagccgctcccaaaggcaactacggttctttaagaacacgtggttgggaagtttcattggattacaaccaccgtttcaacaacggattaggcattaatgccatgttcacgttgtctgatgcccaaactgaaattacagaatacagtgatacgcgtttaatcagcgattattatgtaggcaagaaatatggcgaaatatggggctatagaacagaacgtttgtatcagaaagatgatttcgtatatgacaataacggcgaactggttactgtatgggctttgaacggaaaagaagtggcagcaggcactccgggtgctaaagaaatgaacaaactaaaagacccgaacggagtatatcaggacttcctgcaatccggtgacttcaaatttggtccgggcgacgtaaaatatgccgacttgaatggagacggaaaactgggtaatggcgccggcactgtagaagacccgggcgataaggaaataattggtaatgaaacaccgagatttgaatacggtatccgtctgggcgcagattataaaggctttgacttttctatctttatgcaaggtgtaggcaaacgtcagatatggggtaacggtttccttgccattcccggttataatactgccgacggtgctattcctgacgctatcgcaagtgactactggactgaagagaacacaggagctttctatgcacgcccatggaaccaatccggatcgaacgatgcttacaactattacaaacagtcacgctatctgctggatatgtcttatttccgcatcaagaatatcacattaggttattctcttccggaaaatatcataaagaaagtacgcatgcaaaaggcacgcatctatctggcgctggaaaacttctttacatttgacaacctgaacggacttcctattgatccggaagcaatctccggttactccatgttcaatgcagagaactataacagcggccgtaccggtgtaggaaccccgactttcaagagtgtgtcagtaggtgtacaattgaacttctaataaactgaattatatgaaaaaatatatatttgctttactttctgccgcaacctttatgacaagcgggtgcgactctatcctggaacgtccggaattgacaaagccactggacgaaacgtatggaaagacagataacgaataccgactctatgtcaacgaagcataccccgtttattttgtgggttacaacaatagctggggcagcgcatacgctcctttaagaggatacaatttttctgatgacaatgcttcatccggaaaacagacctcttttgagaataccgttcccaccagccgcggaagttacaacaccagcgacctcgccaactcctggatttcccaatacgcagccggtaactggaactttgcctgggtacgcaaatggaatataatgattgacaaactggagaagtataaaagtgcgctggaagaagaaacctataaccactggatgggagtagcccgattcttccgtggatttgaatactgccgtctggtagaaacctttggtgatgtaccctattatggaaaatccattagcgatgcagataccgatgaaatgtataaagaccgcacgccacgcaacgaagtcatggaacatgtgtacaatgactttgactttgcattaaataatatccgtgaaaatgacggagcccaatatctgaacagatttattgcagccggtttcgtcagcagactgatgttattcgaaggaacttggcagaaatatcataagaacgatactgaacttgcaaagaagtatctgactatggccaaggaagcaggagacaaggtattaggaaacagccaatggcagatttccggtgatttcaaaagtctgttcggctcaacagacctaagcagcaataaagaggtactgatgtacagacactatgatgccggagtcaacgtaactcactgtgtggcttcttactccaacggtacggaaagccaaggtggcgcaacattggcattagccaaatcattcatctgcaatgacggtaaggtgtacaaaaaatcaactgttgccggagcagacgaacttgatgtcaagaacatggccaaaactcgtgacccgcgttttgaagctacattctgggatgaacctcgtatccaggcaggtaccttgctttatagctggaaattcattgaccgtgtaggcccgacctattttggcaagacttatcctcctcaatataaaagtataactaataccaatgattatccggtaatgcgactggcagaggtcatgttaaactggctggaggccaaagccgaactggctttgatgggcggtgaccctatcattcaagatgacatcgaaaaaacaatcaaccaaatccgcaagcgtcctctcgatgaaacggcaataaaaaaaggcttgcaacaaaccgcacctatgatgttaagtgacatcactgccgacttcgacccagatagagacaaaggcaatttggtagcaggagattacgaagtagatccgctgatttgggaaatccgccgcgaacgccgcatggagtttgtatacgagcactcccgtttgcttgatttgaaacgttggaagaaactgcattatatgaacaacaaaacatatccggacacaatgctcggcttatgggtgaaccttgaggaagaactgcccaattatcttgaagaagacaacataggcatcaccaccgtagcagttcccgatggtaacggatataaatacatagtctatgacggaaccaacgccgatgagatgacaggtttctatgtgccggaagcagccgaagcaagagacgatttcagcgatcgttcatatctggctccggtaggagaagctcaaatcaacgagtacaatgctaaaggatataaattgacacaaaccgttctctggtaacagaaaaaaaagcataactcacaacaagaggtgtatcaagaacgaaagtttttcttctcgatacacctctttcctatatatacctgaataccagataagagcgttttgtcgtaattgtaaattaataattataatactaaatattcccaaataagtgtttttgatattaaaataaaaagtatctttgttccatacaaattctccttaagtaatactattatgaagaaactgctactattaaccatcctgctatgtagttcattactgtgtcaggcacaaaaagagcgcattgtcttaggcgatgaacaaacttcagagtattttccaatcctgaaaggaaaacggattgcaatcttctccaatcacaccggaatggtgggagacaagcatttactggacatactgctggaaaacaaattcaatgtagtagctattttttcacctgaacacggttttcgcggagatgcggatgcaggagagcacgtatccagttcggttgacaagaaaacgggcgtccctatcctttccctttatgacgggaaagacaaaaaaccgagcgaagcatccatgagaaaatttgatatattggttattgacatccaggatgtaggcttgcgattctatacctattatataacaatgtgccgactgatggacgcctgcgccgagtacaaccgcaaggtattgttgctggaccgccccaatccgaacggacattatgtagacggaccaatactggacatgaaatacaaatccggagtgggttggttgcctattcccattgtacatggcatgacactgggcgaactggcattaatggtaaacggagaacgctggttaccggcttcacgcgtgtgcgaccttaccgtcataccctgcaagaattatacgcaccagacaaaatacacattgcccatccccccctctcccaacctgccgaacatgaaagccgtctatctgtatccggctacctgctattttgaggccactcccgtcagtctgggcagaggaacttcactcccgttccaagtatacggacatcccaatatgacaggctatgactacagttttacgcccaaaagcgttcccggcgccaaaaatccgccccaactgaacaagctatgccacggcgtaaacctcagtaatatgagcgatgaagaaatttggaagcgcggcgtggatctgagctacgtaattgacgcttataagaacctgaacataggcgaccacttcttccgtccgttcttcgaactgctggtaggaacagactatgtccgcaagatgataatagaaggaaagagcgccgaagaaatcaaaaaccgctggaaaggcgatgtggaaaagttcaaggaacagcgtaagccctatttgctttatcaagaatgattattcatacaaaccggaacctattaaccagtaaacactaatacccaatcaatacaatgagcccgttatccgttatcatcaccattgcagcctattttgcaatactcttcacagtatcttacattgccggcagaaaagcagacaatgcaggtttcttcgtgggcaaccgcaaatcgtcctggtatgtggtggcatttgcaatgattggctccagcatatccggagtaacgtatgtatccgtgcccggcatggttgccgcaagtaacttcggctatctgcaaatggtattgggatttattgcgggacaattaatcatcgcctttgttctgacccccttgttctaccggatgaatctggtttccatttacgaatatctggagaacaggttcggcatgtcctcataccgtacaggggcctggtttttcttcatctccaaaatgcttggagcggcagtacgcctgttcctcgtctgcctgacattacaactgctggtattcgaaccattcggattaccttttattctgaatgtggccatcaccgtagctttggtatggctgtacactttccgtggaggcgtaaagtcgctcatctggacagactccttgaaaacgttctgccttgtggtatcggttgtattgtgcatctgctacatagcctccgaccttaatttgtctttcaccggtatgctcggtacaattgccgacagcgatatgtcccgcatatttttcttcgacgatgtcaacagcaagcaatacttcttcaagcagttctttgccggagcatttaccatgatagccatgaccggattggatcaggacatgatgcagcgcaacctcagctgcaaaaatttcaaggactcacaaaagaacatgattaccagcgtcatttcgcaattcttcgtcattctgttgtttctgatgctgggtgtactgctctacatatttgccggcagccaaggaatacaagtggagaaaagtgatgaacttttccccttaattgctacaggaaattacttccccaccgttgtaggcatcctgtttattatcggactgatttcttcggcttactcggcagcaggctccgcactgacagcccttactacatccttcaccgtagatattctcggcacaagaggaaggacggaagaggaaatcgtaaaaatccggaaacgggtacacataggaatggccgtaataatgggtattacgatttttgtattcaacctgctgaacaataccagtgtaatcgatgccgtatatattctggcaagctacacctatggtcctatcttgggactgtttgctttcggcatcttcatgaagcagcaggtgcgggacaaatacataccgttagtcgccatcgtatccccgcttctttgcttcatcctgcaaaagaattcggaagcatggttcaacggttatcagttcagctatgaattgcttatattcaatgcactgttcaccttcatcggactctgcatactgataaagaaagacaaaaagaacatttaacttaatacatcatcatcatgagtgtaagactccactttttgctcagcatgcttgccaccgcccttatcccccaaacgggcggtgcgcaagagcttccgacagaaacccgccgggaaataggcaagtttctggacgccactgcacgaaaagaaatatccgtaggacatatcaccgttgactctgttgccataaacggcaacaccctgcaactctttgccaacatgaactgttcctacattcctttccgtgaggacaatgtagccgaaatttacaaaggcatcagcgccttgttgcccaccgaatttgcaaagtacaggctacagctacgcaccaacagacatagtatcgaagaactgattccccaagcgttgcgttcgaaaaaagacaaaaaggctcttacattcagccaggatgtagaaaagcctctggtaaccaaagtttccagaccttatactccaaccaacggactgcaaaaccgtcatattgccttatggcaaagccacggtttttactacgaaccgaaactcaaccgctgggagtggcagcgtgcccgctgtctgcaaaccgtggaagacctgtatacacagagcttcgtattgccctaccttgttccgatgctggaaaacgccggagccaatgtactgcttccgcgtgaacgcgactgccagactgccgaaatcattatcgacaatgacggttgccttaacaccggctctacctatgccgaacgtaccgctgacaaggtatggcagcaaggcacaggaaaaggtttcgcacatcttcgcccgcaatacatagattttgagaatccttttaaagaaggtacattccgtatcgcagaaaccgtcaaaaaaggaaaagaaagcacggccgaatggattcccgaaatacctcaaaacggacaatatgcagtctatgtctcttatcagactgttccaaacagcagtgacgacgccctttataccgtttatcataaaggcggggtatcccaattcaaagtcaaccagaaaatggggggcggcacttgggtctatctgggaactttcggttttgatgccggaaaaagcaatgcctgcaaggtgactctgagcaaccgttctgccaaagccggacaaacagtcacagccgatgccgtaaagattggcggcggcatgggaaacattgcccgccgtatctctgaggaaggggcaaccgataatttgaaaagctccgacaaaaccgtcaacgcatcaaatgcagcaaagaatataccggcagcatatcaaccgtcctatatcaccgaataccaaaagagcggttatccccgtttttgcgaggctgcccgttactggatgcaatgggccggcattccggacagcgtatattccgaaagccacggaaagaatgattacacggatgactataaaagccgtggaatatgggtgaactacctggctggcggttctgccgccaaccccacggaaaaggggttgaatattccggtagacctggcgtttgccttccactcggatgcaggaactaccctcaacgactctatcatcggaacactcggcatctatcagaccgatgcctacaacggagtatttgccaatggggcatcacgctacttgtctcacgacctgacagacctgattcaatccaatatcgtacgcgatatccgcacactgtatgaaccccgatggacccgccgcggcaaatggaatcaatcatactatgaagcccgcgttccacgcgtaccgaccatgttacttgagttgctttctcaccagaactttgccgatatgcgttacggcatcgacccgcgcttccgatttacggtaagccgcgctatctacaaaggaatgttgcagtttctctgttcgcaataccgtatggattatatagtacagcccttgcctgtagaccacatggcattgcgcatgatcggtgaaaatgaaatcgagttgacctgggaagctgtaaacgacccgctggaaccgacagccgctcccgagaagtacatcgtttatacgcgtatcggcaacggtgacttcgacaacggcacagtagtggataaaaacagttaccgcaccgttcttcccgccggtatcgtatgcagctataaggtaaccgccctcaacaagggtggtgagagcttcccttctgaaattctttcggcaggacaggctttcaacagcaaaggtgcagtattggtcatcaacggattcgaccgcatcagtgctcccgccgactttgtagcccctgcacctgccgacacgctacttgcaggttttctggacgatttggaccatggagtaccttatatcaaagacatcagctacatcggaaagatgaaagagttccgccgttccatcccctggatggacgatgacgcatccggtttcggcgactgctacggcaactacgaaacacaggttatcgccggaaatacattcgactatccggcagtgcacggagctgccatactgaaggccggttactccttcgtttcatgcagtgatgaagctgttgaaagcggacaagttgtcctgaacgactacacatacaccgaccttattctcggcaaagagtgccagaccaaaataggcagaggcggaataaagcctttggagttcaagacattcagcaaaccgatgcaagactgtattacagcttactgtagccaaggcggcaatatctttatatcaggcgcctatgtaggaaccgacttatgggataaccgcctgattcccgccaatgaagaagacaagaaatttgctacggaagttctgaaatataagtggcgtacagggcaagccgccacaatgggtaaagcgaagtgcgtagcttcccctttcccttctctttcgggaaactatacttatcataatgagcttaattcggattcttacgcagtggagtcccctgacgccatcgagcctgctacgaaagaagcgcataccataatgcgctattcggagaataacctgagtgccggaattgcctatcagggcgaatataagacatgcgtcttaggattccctttcgaatcgcttcgcacggcagaagaaagagcatctctgatggacgctattctgacatttttcaacagcagtaccaagaaataaagaataatttataaaaccaatcatcatttatgaaccgaagactattcaccagcgtcctgtttgcctgcctgctaccgtttatggtgcaggcacagcaggccgtgttccgcttcgcacaactgacggacatccacttaagtccgaacaaccccaatcctacggaagatttattgcgttccattgcacaaattaatgcaaccgacagcatcgatttcgtattggtgacaggcgacattgccgaagagggcgaccgcaccaccatggaaaaagtaaaatcatgtctcgacctgctgaaagtgaaatactacgtagtgctgggtaaccatgaaaccaaatggagcgattccggctgtaccgccttcggagagatattcggtggcgaacggtttgaattcgaacataaaggctttttgttcctcggttttaattcaggcccgctgatgcgtatggcatacggccatgttgtccctcaggatatccgctggatgacggaaacgatggaccggtacaatgccggcaattcccggccggacaaacctgtaatacttgttacccactatccgatgacggaaggcgatgtggacaactggtatgaagtgacggatgccgtgcgaccatacaacatacgcctgtttataggcggacactaccaccgcgaccgcgacttgcgctatgacggcattccgggtatcctgatgcgcagcaacctgcgcgacaaggatgaaaagccgggctacggcatttatgagattacagaagattctatcctcgtttatacacaacgcatcggagaaccgaaaagacaatgggccgcattctcgctgacggattcatactatgaccgtaatgggaaagccgaaaaatatcccgacttctccgtaaacaaagagtatgcacaagtacaagagcaatggatagtgcaaaccggagccggcatctactgttcaccggcagtggaaaaagacaaagtattcgttggcgacgacctgggacgcctcactgcctatgcccttaaaaacggcaagaaactatggagtttccaatccggaaaaagaattgtcggaacacctgccgtaagcgaaggaattgtcgtattcggttccgccgattgtaagatatatggtctggatgcccaaaacggtaatctgttatggacagtagaagctgccgaacctgtattgggagcagtgacaatagagaacggcattgcctatatcggtgccagcgaccacactttccgtgccgtaaacattcgtaccggagaggtgaaatgggcttttgcaggcgtaagaggctacatcgagaccaaacctttggtaacggacaataaagttatcttcggcgcatgggacaataccttatacactttaaataaagcagacggcaaggaattatggaaatggacaggcggactgacgcgcatgcacttctcccctgccgccgtatggccggtggcagccgatgggaaggtattcattaccgacccgcaacgtgccatgaccgccattgacatagaaacgggcaatactgtatggcgtaccttccaatccatggtacgtgagacaataggactgtccgaagataaagaacgtatttacagcaagaccatgaacgacagtatcgtatgctactccaccaaaggcgaccaaccgcacaaactgtgggcatccaatgtaggcttcggctacgagcatgctccttccatgcaggtagaaaaaaacggagtcgtattcggaagtaccaaagaaggacttatcttcgcgctggaagccgcgactggcaaagtgctgtggaaacacaaaacaggcaattcgctcataagcacagtggtaccgctcgacaacaaccgggtgctgtttaccgccacgagtggaaaaaccggaatgctgaagtttaaaataaaaaaatgagaattttaaaataataccttacagatatgaagaagattgattgctttattccttttgcaggaaaagaacaggctgaaaagacagtacaaggattacaggctacaggtcttatcggcaacatccgtttagtaacgacagaccctacgctcgaaccattgcccggctgtgagattttatccgtagacatgccctacagcagcactgccatgaaaaccattgccgaaaaaaccgatgctgaatatacattgctatacaccaaagaaacgactcttgaactgggtatgttcgctttggaacgcatgatgcacattgcagaagattcggatgcaggaatggtctatgccgaccattaccagatagccgacggcaagcagacgaatgctcctgtcatcgactatcagttcggctcgctgagagacgatttcaatttcggctcggtactccttttcaatacttcaaagctaaaagaggcagcctgccgcatgaagtgcgattataactttgccggcctttacgacttacgactgaagctgagccaaaaggcagacctcgtacatatcaatgaatatctgtacagtgaagtggaaaacgatacacgtaagagcggcgaaaagatattcgattacgtcgacccgaagaaccgtaaccgtcagattgaaatggaagcggcatgcacggaacatctgaaagaaatcggtggctacctgaaaccggagttcaagcagattgagttctctgccggaaatttcgaatacgaggcatccgttatcatccccgtacgcaaccgtatacgcaccatccgcgatgctatccgttccgtactggaccagaagacagacttcaagttcaatcttatcatcatcgacaaccactctaccgacggaacgacagaagccatcgacgagtttaagaatgacgagcgcctcatccatatcatccccgaacgcaacgacctcggcatcggcggttgctggaacatgggcgtacaccaccccaaatgcggcaagtttgccgtacaattggacagcgacgatgtatatgccgatgaaaatacattggccactatggtacgtgctttctacgaacagaactgcgccatggtagtaggtacttacatgatgacggacttcaacatgaacatgattgctccgggcatcatcgatcacaaggagtggacaccggacaacggacgtaacaatgccctccgcattaacggtctgggtgcgccgcgcgcattctatactccggtactgcgcgaagtaaaagtgcccaatacgagctatggcgaagactatgcccttggactgaatttctcccgccaataccagataggccgtgtctatgacgttgtttacaactgccgccgctgggacgacaactcggatgcctcattggacatcgtcaagatgaacgggcacaacctttacaaagaccgtatccgcacgtgggagttgcaggcacgcatcgctatgaacaagaaaaacggtaaatgacctatgaatcagaccatacacaatcttctaaccgagcagcttgcttcctgggaaacggcgcgtaataactacgccgccctttccggagtgcagatgaaagaactgaatgtaaacggcaccctttataaagtacagttcaatccggcacgtatcgtatcttccggagccaaagtagatgcaaagtccattaaggaacgtaaatgctttctctgccccgccaacttgccggcagtgcaaaaaggcatcccgttcgaaggacactacaacatattggtcaatccgtttcccatattcccccgtcacctgacggtaccggaaaccgcacatgtcgcccagcgcatagctccccgcttcggggatatgctggacctggcacggcaactgaccgactacaccattttttacaatggtcccaagtgcggcgcttccgctcccgaccacgcccacttccaggccggcaacaaaggcttcatgcctattgaacaagactggcgtagacaggtagcaggcaaagtagccgactacggtcaggccaccctatggtggctgaacgatgccccgcgcactacgctcgtcatcgaatctgccgaccgcaagacggctattaagctgttcgacaccgtttatcactcattggacatacagcccggtgaagacgaaccgatgatgaatgtccttgtaatgtacgaagacaacaaatggattgtatttgtctttcctcgtgccaagcatcgtccggcatgttatacggccgaaggcgacgccaacctgctgagcagtcctgcctccgtagacttaggcggcgtattcatcacccccgtcgagaaagatttcatcaaaataacggcagaagacatcgcacagatattgggtgaagtatgcctttctcccgcagattttcaaaaggtgcggaaacgcatccaggaacaactgtaatatccgtcatccctttaaataaacaagtatgaaagagcccaaagtagaagtcggcatcctattcgagccacagatagaatttatcctgcttgccccctaccacgtatccggcaaggaagtcaacggcaagcagactgttacctacgacgaaggtaagatcctttggaacggcaggcaatatgacgaattagtgtttgaacccctgcaagaatccgttgcggcattcgagttgctggatgtgactatcgggataaacttccactgggaacgcaaagaagaccaacgcttccagggttctttaaagattatcgtagaaaacggcaagctgactggtatcaatgtcatccgcgtggaggattacctgaccagcgtcatctccagcgagatgagtgcaaccgcttctctggaactgctgaaggcacatgcagtcatctcgcgcagctggctgcttgcaaacctttccggtttgcaaactgacaaattacaactgcctgttggtaatgataccatacggaataaaaacgcaaaccaagacaacgcagccaattgccaactgtcaactgccgactgtcaattgaaatggtatgagcgcgactctcatacccatttcgacgtatgtgcggacgaccactgccagcgctatcaggggataacgcgcgcttccaccgatatagtccgccaggcgatagccgccacccgcggacaggtacttacctcagaaggcagaatatgcgatgcccgcttctccaaatgctgcggcggagcattcgaagagttccagtattgctgggaagatatcaaatatccctatcttgccaaacagcgcgattatctgacaggaaatgaaaagactgctcccgaactgcccgacctgactcaggagtccgaagccgaccattggatacgtacttcccccgaagcattctgcaataccacggataagaaaatcctgtcacaggttctcaacaattacgaccaggaaaccaccgatttctaccgttggaaagtagaatatactcaagacgaactctccgtcctcatactgaaacgttccggcatagactacgggcagataatcgaccttgttcccgtggcccgcggcacctccggacgcctttggaaactgaaaatcgtaggtacgaagaagacgctgactatcgggaaagagctggaaatccgccggacgctttctccttcacacctttacagctccgcctttgtcgtagaccgcgcagaagtgtcggaggctggcatccccggacgtttcatcctcaccggagccggatggggacatggcgcaggtctctgccagataggtgctgccgtaatgggagaacaaggatacaaatacgatgagatattgctgcattactacatcggcgccagtatcgaccaactatatgactaatcctataacagaaaaacaattgacagaatgaacaatatcaagaaaatatccccctgggcatgggtccctaccttatatttcgcacagggtatcccctactttatcgtgaacaacatctccgtactgatgtttgccaagatgggtgtacccaatggagacatggcgctatttaccagcctgctgtatctgccatggactatcaaacctttctggagcccgtttgtagacattatcagaaccaaaagatggtgggtagtttccatgcagattcttatgtcgatagctttcatcctgctgaccctgaccattccgcatccggacgaagcaaccatgacagcgggcacgactcctatcagtatgttcaccgtaaccttgatactgtttatcatcacggcattcgcttccgccacacatgatattgccgcagacgggttctatatgctggcattgaaatcgggcgagcaggctgagtttgtcggtatccgaagcactttctaccgccttgcgtctatcttcggacaaggagtgctcgtagccattgccggtgccatcgaactgaaatacgacaatattccgctgtcgtggactatcacgatgctggttacggccgttatgttcagtgcagtaagtttttatcaccttttcatgatacccaaaccgtcttcagacaaatcggtcttggccccgggaacagccggtgccaaggctatttttaaggagttcggacgcactttcgccacctattttaccaaaccgggtgtactgcttgccattgtattcatgctgctctaccgcctgcccgaggcattcctcatcaagatgtgcatgcctttcctcgttgccggtaaagaggcgggaggcttagggctttccacggcggaagtaggcatcgtatacggcactatcggtgtgatattcctcacattgggcggtattctcggcggcatattcgcatcgcgcatcggattgaagaaatccatctggtggatggcggcatgtatgacacttccctgcctgacttttgtctacctggccatttgccagcccgaaaacctgtttgccatatcaacggcgattgctatcgaacagttcggctacggcttcggtttcacagcctatatgctctatatgatgtatttctccgaaggcgagttcaagacatcacactatgctatctgcaccgcattcatggcgctgagcatgatgattccgggcatgtttgccggttacattcaggaagctatcggctataccaacttcttctggatggtaatcgcatgctgcattgccaccgtgatagtcaccgtctttgccgacaggcggatagaccccgaatacggcaagaaataaaagattgataaacgaaccataaagatacccattatgaaaaaacatctcgttctttgtatcctttgcaccctttgctgcgtgacatacgcacagaaaataaaaataaagaccggcatcgaagtgctgaaagagcaaaacttcaaatgcctggaaggtaaacgtgtgggactgattaccaatcctacgggagtagataatcacatgaaatccaccatcgatattctgcacgaagcgccgaacgtgaatctcgtggcactctacggtccggaacatggcgtacgtggtgatgtacatgccggcgatcacgtaacggacatcaaggatgcctcaaccggactgcccgtctattccctctacggcaagacacgcaaagcgactccggagatgctgaaggacattgatgtactggtatacgacattcaggacatcggctgccgctcattcacctacatcagtaccatgggacttgccatggaagccgctgccgagaacaacaaggaatttatcgtactggatcgccccaatcccgtaggcggattgaagatagagggtaatctgacggaagatgactgcatttcctttgtcagccaatttaaaattccgtacctttacggactcacttgcggtgagctggctttcatgctgaatggggaaaagatgctgaaagacggcaagcaatgcaaattgcaggttgtaaagatgaaaggctggaagcgcaagatggactatacacagaccggattgcaatgggttccttcttctccgcacattccgcacccgcactccgcatttttctatcccgtgagcggcattttgggagagttgggctatatgtctatcggagtaggttacacgattccgttccagatgttcgctgccccgtgggtggaagccgagaaacttgccagaaacctgaacgggctgaacgtaccgggtatcgtcttccgaccgatgtacctgaaaccgttctactccgtaggtaaaggagagttgctgcagggcgtgcaagtgcacatcatggatttcggcaaagcaccgctaagcgagatacagttcctcgtaatgcaggaagtagccgcgctctatcccgaccgtgccgtatttgaccatgcggataaaggccgtttcgccatgttcgacaaggtaagcggctcaaaacagatacgcgaacgcttcagcaagcgcaaccgttgggaagacatccgcgactattggtacaaaaacgttgaggagttccgtaaactgtcgaagcagtattatttatataaataatttgacaagtataaaaaacggtaagtcgcatactgaatatcattcggttgtatattgaatgcacttccctataaagttctttcacaagttgttgcgacaaggattgcgggaagaagcacaggagtaaaaagatctatacattatggaaaagagtaactacatggctttcctgcaggaagcgagacaattcattccgcaggagaggatttacaccgacgaactccgtcggttggcttggggaacagatgccggtttctaccgcctcatcccgcaaatcgtaatccgttcggaaggagaagaggaaatctcccggctgctgaaacttgccggcagccacaacctgcccgtcactttccgggcagcaggaaccagcttatccggacaagccatcagtgactccatacttattgtagccggcaaacattgggaaggctacagcatatctcccgaccacgaagaaatcaccctgcagcccggtatcatcggacaacgggtcaatgaattgctggctcctttcggacggaaattcgctcccgaccctgcctccgtaaaaagcgccatggtgggtggtatcgtcatgaacaacgcttcgggcatgaactgcggtacgcatgccaacagcgacaaggtacttctctccgcccgcatcgtactggctgacggaacggtactcgacaccggcgacagcgtaagccgcgccgcattcgaagtgacacaccgcgatttcatccggcgcatctgcacgctccgcgatgaagtgcgtgccgacgggaaactggcggaacgcatccgctacaaatattccataaagaatgtaaccggtctgaacctgctcccttttgtccgcttcgacgatccgttcgatatcattgcccatcttatggtgggttcggagggaacactcgcattcctctcgcaagtgactatgaaaacggagtatgactacccttgcaaggcaagtgccatgctctacttcaagaccataaaagaagcttgccgtgctgtggtagccatgaaaaaactaaccggcggcaatggtgagtggacggtaaaaggagcagagctgctggactggaaatctctggcatcggtaagcgaccccgtattcctgaagtataagggcgaaatatgttcatccaccctgcccggcgtagaaccgggagacgagaccggactgaccgccgtgctgaccgagaccaaagcccgcagcacggaagaacttcggcagaacatccgtacaatagaacaatgcctttccgctttccagacctacacacccgtatgcttcaccgacaagcccgaagagtattcgaagtactgggccatccgctccggcatcttcccttccgtgggcgggacgcggaaaccgggaacaacgtgcctcatcgaagatgtggctttccacatcgaggacctgcccgaagcaaccgccgaattgcagcaactcatagcccgtcacggctacgaggatgcctgtatatacggacatgcgctggaggggaactaccacttcatcctcaatcagtcttttagcagcgaagccgaaatgaaacgctacgaaaacctgatgaatgatgtcaagacactggttgcggacaaatacgacggctcgctgaaggcagaacacggtacgggcagaaacatggctccttttgtacgccacgaatggggagatgcagcctacgaggtgatgaaagccgtcaaaaacctgttcgacccgaaaggtctgttgaatccgggcgttattttcaatgacgacccgaaatgccatatcaaaaatttcaaaccgcttccgctgattcccttggatgcccaaaatccggcagccaaagtaaaccgctgcatcgaatgcggcttctgcgaagtgaactgcctgtcctgcggcttcaccctctcctcaagacagcgcatcgtgctgcaaagggagatagcccgacttcgacaaagcggcgaggcccccgaacgtctcgccctgctggaaaaacaataccgctatcccggcaaccagacctgtgccggcgacggtctctgttccatgtcctgtcctatgggaatcaatacgggtgacctgacacacatcatccgccagaaagaattgccgcaaggcagcatgggatataaggccggcaatttcgccgccaatcacttcgccggcataaaaagtgcactgcgccctgtattgggacttgccaacctcggtcattccgtattgggaaccaaagcgatgagctgcatcaccaaaggcatgcacaacgttctcggcatccccctttggacgccggcaatgcccaaagcctattcaattaaaagttcacaattgacaattgacaacgataccctgcggaataagaacgcagacaaagacagttcggctaatgatcaattgaaagtggtttatttccccagttgcatcaaccagacaatgggactgccaaagaaatcgcctgtggagcaggcattggcgagcaaaatgattgccctgctgcaaaaaggcggttacgaagtcatcttccccgaaaacatggaaaagctttgctgcggcacaatctgggaaagcaagggaatgcttgacattgccgaccgcaaatctgccgaactggaggcagccttgtggaaagccagcgaacagggcaggtatcctgtgctgtgcgaccaaagcccgtgcctgcaccggatgcgcgagaccatccataaaatgaagctttacgaaccggcagagttcatatatacattcctgcgcaacagactggtattcacccctaccgaccgccctgtggcagtccacatcacctgttccatgcgcaagatggggcttgccggcacgattacagccttggcacgtctctgctcatccaaagtcatcgtacccgaagaagtaggctgctgcggctttgccggcgaccgcggcttcacatatcccgaactgaacgcatacgccctgcgcaaactccgcccccagatagaagcagccggcgtaagcatcggatattccaacagccgtacctgtgaaatcgggctgacaaccaactccggtattccgtatgtgtccatagtctacctggtagatgaatgtacccaacccgcaaccgttaaactcaacaactaacttaacacacaaaaatcatgagtagtacagtaaaaacaaacaagcgcatccttgccctcgacatccttcgcggtgtcaccattgcaggcatgattatggttaacaaccccggtacatgggcgcatatctatgcccccctgcgtcatgcggaatggaacggtcttacccccaccgaccttgtattcccgttcttcatgttcatcatgggaatttccacatacatctctctgaaaaagtataatttcgaattcagccgtaccgccggcatgaagattctgaaacgtaccatactcatcttcctcattggtatgggtatcggctggttctcgaggttctgttattactggacttctcccacggagggcatcggcttcggcgcccaactgtgggaagccgcatggacattcgaccgcatccgtatcctgggtgtcatgcagcgtctggccctttgctacggtgctaccgctatcattgcgctgaccatgaagcaccgcaacatcccctatctcattgctaccctactggcaggctacttcatcctgttggtttgtggcaatggatttgcctacaacgatacgaacatcctttctgttgtagaccgtgccatccttacccccgcacatatgtacaaggataacggcatcgacccggagggcttactaagcaccatccctgccatagcccatgtactgttgggtttctgcgtaggccgtatgatgctcgaaggaggcaaggctgatgaaagccgtgaaagtatgctgaactcgcatcttatcaaactgtttttagccggtaccatccttacattcgccggcttcctgctgagttacggatgccccatcaacaagaaaatatggtcgcctaccttcgtactggctacctgcggattagcttccagcttcctggcgctgctcatctggattatcgatgtgaaaggctataagaaatggagcctcttcttcgagtcgttcggtgtcaatcctttattcatgtatgtgctgggcggtgtgctcggcattctcttcggcagcatctgcttcccgtggggcgaaggtagcatcagcatacacggatttctgtacaaagtgctgttaatgcccgtattcggcgaaaccggcggttcgctggcgtatgcgttgctgttcgtcggcatcaactggtgcatcggctaccaactctataaacggaagatttatatcaaactataatcggataaactcaaaacaagtaataatatgattctaatagcagacagtggctctacaaagaccgactggtgtgttgtagagaacggacaactcatccggcagatatttacgaaaggaaccaaccctttctttcaatcggaagaggaaatcagtaatgagattgcgacagcactgttgccccggttaacgaccgatgcattggatgctgtatatttctacggtgcgggatgcggatttcccgacaagataaccatggttcaccgtgccatcaccaagcatctccgggtaaagggagaggtggaagtaaacacagatatgctggcggcagcccgcggactttgccagcacgatgccggcattgcctgcatcatgggtacaggctccaactcatgctactatgacggcaagcagattgtatccaacgtatctccactgggattcatcctcggagatgaaggcagcggcgccgtattgggcaagctgttggtaggcgatattctgaaaaaccagatgccccccgaactgaaggagaagttcctcacgcagttcaacctgacacccgccgatatcatcgaccgtgtataccgcaagccgttccccaaccgttttctggcaagcctctctccattccttgcacagaacctggacgaaccctgcatacgcacgctggtatcggacagcttcaaggcattcctcaaacgtaacgtgatgcagtacgaaaactaccgtgaaagcaaggtacactttatcggctccgtggctttctattacaagacgatattggccgaagctgccagcgaaatgggtatccggctgggtacggtcatcaagagcccgatggaaggtctgatagaatatcacaagtaatcgtaaatagtaaaccgtaaactcgtaaatagccttatgtttgtaaaaatctcagagcaaccttcgctctacaacgacttggaaaagaagtctgtccgtgaaatactggaagacatcaacagggaagaccagaaagtggcgcttgccgtacaaaaggcaataccgcaaatagagaaattagtgacacaaatcgtaccccgcatgaaacagggcggacgcattttctatatgggtgccggcacaagcggccgtctcggcgtgctcgacgcctccgaaataccaccgacattcggcatgccgcctaccttgattatcggtctgatagccggcggagacactgccctgcgtaatcccgtggaaaatgcggaagacgacatgcaacgcggctgggaagagctggtggaacgcaatattacggacaaggatacggttatcggcatagcggcatccggcacaaccccctacgttatcggtgcgctgcacgaagcccgcgagcatggcatcctgacggcttgcatcaccagcaatcccgattcgccaatggctgcggaatccgatgtacctatcgagatgattgtaggacctgaatacgttacgggaagctcacgcatgaaatcgggtacaggacagaagatgattctgaatatgattaccacttccgtaatgatacagttgggccgtgtgaaaggcaacaagatggtgaatatgcagctcagcaacaagaaactggtggaccgcggcacgcgtatgctggtcgaggaactggggcttgactacggaaaagccaaggcgctcctgctgatgcacggctcggtgaagaaagcggcagacgcttaccgggccagggaatgacaactggcagattcactacagagcacacagagatctcacccggttttcagacagaagaacaaaagaacgaaagaacagactctgccttgccgcatgcggcaccttccgcactgtttatgttcccggttcttctgtccgaaaatccacttatagcaaacaagatatgaaaacacttaccagtatccttgtacttctgttcggtctgcaggtagccaccgcacagcctttgcagcgggtagctcccgaacaggcgggactggattcccgcaaactgatgtatgccgatgaagccattgaaacggccatcgccggcaaagagattcccggcgccgtacttgcagtggtacgtaacggtaaaatggcctatctgaaggcatacggcaacaaacggatttatccgaacacggaacctatgaccgtaaataccgttttcgatatggcatcctgcagcaagtccatatccacagccgtatgcaccatgattctggcagaacgcggaaaaatacgcctgctcgaccctgtgagccgctacatccccggcttcaaggactgggagagcgaagacggaaaagacaaaaaggtgatccgtatagccgatttgctgacacacagttccggactcccgccttatgccccggctgcggagctggaacagaaatacggttctcccaacccggcagggctgatggagtacatcgccggatgcaaacgcgatttcaagccgcaaaccggctttcagtacagttgcctaaacttcatcaccctgcaacacatcatagaggccgtcagcggacaatccttgcgcgactttgcccgtgaaaacgtcttcgacgtactgggtatgaagcataccgattatctcccttgcctacgcgacaagaacggcaagtggataaataccgttcctctaccggagaacattgctccgacagagaaacaacccgacggacaggttctttgcggacaggtgcacgacccgcttgcacgcattctcaacggcggcatcagcggcaatgcaggcgtattctcctgcgccgaagatattgccatactttgcgccgccctgcaaaatggcggagagtggaacggacatcgcattctcagcccgcaaggcgtaaagaccatgcgcaccgtaccccgtgctacagcagatctgggccgctcaccgggttgggatgtatgtagcccctacgcatccaatgccggcgatttctttggtccgaatacctacgggcatacgggctacaccggtacatctgtcgtaatcgaccccgacaatgacacgtctgtaatcctgctgactaacgccgtgcatccggaagacggacacagcgtggtacgcctgcgctcactggtagccaacgcagtggcagcctctctgtatcccgctccgcgcacatatacggaccattattacaaacgttttctccagttcatggacgaacctgccatcggcagcaaagatatagtcatgctgggcaacagcctgacggaaaacggtggtgactgggccgcccgccttggcaacaagcacgtacgcaaccgcggcatcatcggcgatgaggtaatgggtgtgtacgaccgcctgcaccagatattgccaggacaacctgccaaactattcctgcttatcggtgtgaacgatgtttcgcacgacctgacagccgacagcatcgccggtatgattcgcatgacggtagagcgcatccggaaagagtctcccgacaccaggctttacctgcaaagcctgcttcctatcaacgaaagtttcggccgttataaaagactggcaggcaagacaaatctgatacccgaaatcaacaaacaactggaagcacttgccaaagaaaagggcctgacgtacattaatctcttccctttattcaccgagaaaggaagcaatgtattacgtgccgatttgacaacagacggattacacctgaaagaagaaggctataaaatatgggcgaaagccctcaggaaaaagatttagaaaagacacatgacacgcatataaacggaaaaaggtgataaagaacaaactttaccaccttttctgtttttatatccaatcaatcagtctgcaattccttccaaacatacatcaaaagtcaatgacgtataaccgggaatatcaccggatgaactgccgcttgcaccatatccgctctgccagggaatatacagcatccaacgctcaccgacccgcatatattgcaaagcccatgtccagcctgcaataactttggataccacaaattcggaaggagaattaaacgccgtaggccatttggattcgggagagttttcggacaagggatctgataaaggcaacggaatttcgcggtctgtcgctccgaaaccgtcaaaattgccatcgaactcttctccggtaatgaaagtaccacgatagaaaacgcttaccttttccgtgaacaacgggtatgccccgctatctgttttccacaacttcttgcaatacacatactgaggacgtaaagtaccattgaccccggtaccgctggtcggcacggatatggcatacaacgtgccaatctccatcttttcggcatcttcaagcgaagccacgatattatcgccggtcttacctttaatggaatcaataaaagcttcattacgcggtacccagttatcatattttccggcctcctccacttcttcgcaagccacaaacgcacctgctatgaacagcaagaagggtaaaaacaaaaggaacggtctcttcatctgattataaattacgggattactattattcagcatttgtctcccggcattcagggcacagctttttcgctacgctctgaacggcagggacaaacaaaatacattttatcttattgcagcgttttcagcaaagacgtaatgcttacgcggtctgcaataatattgttcagttcggagatagccacacgctcctgctgcatcgtatcgcggttgcgcagcgttacgcagttatcttccaacgtctggtggtctacggttacacagtatggcgtaccgatagcgtcctgacggcggtagcgcttgccgatgctgtctttctcgtcgtactggcagtggaagtggaacttcaggtcgttgataatctcacgagccttttcgggcagaccgtccttcttcaccagcggcataaccgccagtttcaccggagccagcgcagcaggcaatttcagcaccacgcgggtttctccgttctccaactgctcctcacaataagaagccgacatgatgctaaggaacatacggtctacgccgatagaggtttcgataacgtacggagtatagctttcattggtttccgggtcaaagtacttgatgttcttgccggagaatttctcgtgctgggacaaatcgaagttggtgcggctatggataccctctacttccttaaagccgaacggcatcaggaactcgatgtcggtagcggcatttgcatagtgggccagtttgtcgtggtcgtgatagcggtaatggtcgtcgccgaatcccagcgccttatgccatttcaaacgggtttccttccaagtcttgaaccagtcgagctcagtgcccggttttacgaagaactgcatttccatctgctcgaactcgcgcatacggaagatgaactggcgcgcaacgatttcgttacggaaagccttaccgatttgtgcgatgccgaaaggaatcttcatacgtcctgtcttctgcacgttcagatagttcacaaaaataccctgagccgtttccggacggaggtaaaccttcatcgcaccttccgaagtggaacccatttcggtagtgaacatcaggttgaactggcggacttccgtccagtttttcgtaccgctgatagggcaaacgatttcttcgtccaagattatttggcgaagctcttcaagattgttgtcgttcagcgctttggcaaaacgttcgtgcaaagcgtctcgcttggcctgatgctccagtacgcgggcgttcgtgctgcggaactgtgcttcatcgaaagcctcaccgaaacgcttggcggccttcgccacttccttgtttatcttgtcgtcatatttggcaagctggtcttcaatcaatacatcggcacgataacgcttcttcgaatcgcggttatcaatcaaggggtcgttgaacgcatccacgtgtccgcttgctttccagattgtagggtgcataaagatagccgagtcgatgcctacgatgttttcgtgcagcagcaccatgctctgccaccagtattgtttgatgttatttttcagttccacacccatctgaccgtaatcgtatacggctcccagtccgtcatagatgtcgctggaagggaacacgaatccgtattccttgcagtgtgatacgagtttcttaaaaacgtcttcctgtgccattttttattgtatcttaattaattcgaaatcttcgttcagttaaaaagcgccacaaagatagggatttatcttatatgtagggcaacgggggtattaatttatcttattcttcgcccgtcttttgattcttgtccgcccgccgcattgcaggcgtcaactgactttcgggaacatacagactgaaaggtatcctaaacggttgtacctctttcaaacgtgcagtcagcccgcggtctgccacaaaatacacgcgtgagagcttcaccttgccgggcatcacctgttccgggcggtcaaacccgggactggtaagagcggtctggaacgtccccagattgggaatggtcaccgactgtcccatgctgagaatatcctcaatcgtatctcccaattccgacaggatacccataatcatcccctgtggaaaatggctgcgcttggacagcagttccgccagtttcgttaaatccactccgccgcgttcctgcaatttcttctgaacggcgtaccattgttccttcctcttgccggacgataagtccgctttctttcttaccagatagggtatagtcatgacagtaccattaatttttcacgttagtattataaacatgtacgacacccgggtgtcagcacatccgacacccgggtctcagtatgtccgacatccgggtgtcggtatgttcaacacccgggtgtcgtacataccaaaccggctgtaaagataaacttttattgcgaataaagaaaatcagaaacgacttccttgctccttttttaatgcaatttgcctgttttcccgataaatttcgtatttttgcctgcaactgcccaaccggcggttattcatgaatagacaactcccgaacaaatatgagcgaagactttgaaggaacaaaagatgatttggataaagaactcccgaaggggagcgaagggcattcggattataaacctgcggataccaatgatgcaaacgtcaagcaccaactgagcggcatgtatcagaactggttcctggattatgcctcgtacgtaatcctggaacgtgccgtaccccacatcatggacggactgaaacccgtgcaacggcgtatcctgcactccatgcggcgtatggaagacggacgctataacaaggtggcaaacatcgtgggacacaccatgcagtttcacccgcacggtgatgccagcatcggtgacgcactggtgcaactcggccagaaggatttgctcatcgactgccagggaaactgggggaatattcttacgggagacagcgcagccgccccccgttacatcgaagcgcgcctttccaaatttgcactcgatgtggtgttcaaccccaaaacaaccgaatggaaactgtcgtacgacggacgaaacaaggaaccggtgacgctgcccgtcaaattccccttgctgctggcacagggtgtggaaggtattgccgtggggctttcttccaaaatattaccgcataacttcaatgaactttgcgacgcatccgtaaaatacctgcataaggaagaattcaagctctatcccgatttccagacaggcggcaatattgatgtatcgaagtacaatgacggtgaacgcggtggagccgtacgggtacgtgccaagattgaaaaggtggataacaaaacactcgtcatccgcgagataccttacggaaaaacggtagccagtgtctgtgattctatcgttaaagcaagcgaaaagggaaaaatcaagataaagaaagtagaagaccttacttccggaagcgtggagatattagtccacctcgcacccggcgtatcatcggacaagacgattgatgcactttacgcctttacggattgtgaagtcagcatctcgcccaactgctgcgtcatcgacgagcagaaaccgcacttcctcaccgtaagcgatgtactgaagaagtcggtggacaacactttggccttattgcgccgggaactggaaatacgcaggaacgagatactggaaagcctgcacttctcatcgctggagaaaatattcatcgaagaacgtatctacaaggataaggaatttgaacaggccaagaacatggatgccgcctgcgaacacatcgacgaacggctgacaccttattatcccacgtttatccgtgaggtgtccaaagaggatatcctcaagctgatggagataaaaatggcgcgtatcctcaagttcaactccgacaaggcagaagagctgattgcccgcatgaaagcggacatcgaggagatagaccgccacctggcaaatatcgtggaatatacggtggactggttccgcatgctgaaagagaaatacggcaaagccttcccgcgccgtaccgaattacgcaacttcgacaccatcgactctaccaaagtggtggaagccaatgaaaaactgtacatcaaccgcgaagagggtttcatcggtaccggcctgaagaaagatgaattcatagccaactgctccgacctcgatgatgttatcatcttcttccgcgacggacgttacatcatcactccggtagcagacaagaaattcgtaggcaagaacatactctatgccaatgtcttcaagaagaacgacaaacgtaccatctacaacgttgtctaccgcgacgggaaagaaggcacgcattatatcaagcgtttcgccgtgacttccgtagtgcgcgaccgcgaatacgacgtgacacagggcacacccgactcacgcatcgtgtatttcacagccaatcccaacggtgaggccgaaatcatcaaagtgacgctcaagcccaatccgcgcatacgccgcattatcttcgaagaagatttcagccagataaacatcaaaggacgtcaggccatgggtaatatacttacccgtaacccggttcataagatagccctgaagcagcgcggcggttccacattgggcggacggaaagtatggttcgaccaagatgtcctgcgcctcaactacgacagccgcggagaatacctcggtgagttccaaagcgacgagcaaatcctgatagtgctgaacaacggcgagttctacaccagcaatttcgatgtgaacaaccactacgaagacaatatacgggtattggagaaatatgacccgaacaaggtgtggacggcagtcctttatgatgccgaccagcaggggtatccgtacatcaagcgattctgctttgaagcaagcagccgcaagcagaactacctgggcgaaaacaagaataaccgcctcatcctgctgaccgatgaatactatccccgactggaagtcgtattcggcgggcatgacaaattccgcgaaccgctggtggtcgatgcagacgaatttatcgccgtaaaaggtttcaaggcaaaaggcaagcgactgactacctatacgctggatactatcaacgagttagaacctacccgccaaccggaaactccgcaaatcccggaaagcaagaatgaggaagaacccgaaattctggacccggaccacggaaagagtgaaagcgacatactggacgagctgaccggacaaatgaaattgttctccgataatgatgacagcaaggaacatgaaactacctaaaccgataataccggttatctgtacggtactgctgttatgcagcagtgccatgcaggcacagcttcccgccacagcggaaggtttggaacagagccgcctcgtaacccgcgccaccatgtacggcgtaggtcttacgaatgtattcgacacttatctgtctccccaggaatacaccggtattgatttccgcgtctcgcgcgaaagcatgcgcatgaccagatggatggatggcaggctctccctacagagtttctttcaggccgatttgggatatacccgcaacaaagcggataacaacaatacattctccgcactggcaaactggaactacggcctgcactacaacttccccattacagacaatttcaagttgctcgccggcggtcttgccgacctgaacggcggttttgtctacaacctacgcaataccaacaatccggcatcggcacgcgcctatatcaatctggacgtatcgggcatggccatctggaacttacgcataaagaactatccgctgacactgcgctaccaggtcaatctgccgttaatgggcgttatgttctcaccgcactacgggcaatcctattacgaaatcttctcgttgggcaacagcagcggagtggtgaaattcacctcattgcacaaccagccgtcactgcggcaaatgcttacggcagactttccggtgggacgtgccaaaatgcgtttcgcttatatatgggacgcgcagcagtcacacgtgaacgatataaagacacacacctactcgcacgtattcatggtgggattcgtgaaggagctgtatttattgaaaaacaagagaaagaaataaagaagcggagtgataaatgaagaatgacaagatggtaaggtttctgaaaaatataatggttctgattgccgtgcttcctttgctgggcagttgcatccgcgaagacgaagttgccaattctccgcagggaaactttgaggccctctggaagattatcgacgagcagtactgcttcctggaatacaaacagatagactgggatgccatacacgacgaatacagcaggctgattaccggcagcatgagcagcgaaggcctgtttgaagtattgggaaatatgctgaacgaactgcaggacgggcatgtaaacttagcttccgcccacaatgtttcgtattacgatgcctggtatcaggactatccgcgcaacttccgcgaagacattgtggaagacttctatctgggcaaggcgagtaccgactaccgcactgccgcaggtatcaagtacaagatattcgaagacaacatcggctatatgcgttacgagagtttctcttcgggcataggcaacggaaacctggatgagatactctcctatcttgccccatgcagcggacttatcattgacgtacgcaacaatggcggcggcaacgtaaccaactccgaacgcatcgccgcccgtttcaccaacgagaaagtgctgaccgggtatatccgccacaaaaccggcaagggacataatgatttctccgagccctaccccatagaactggaacccagcaacagcatacgttggcaaaagaaaacagtagtgctgaccaaccgccgctcctacagcgcaaccaacgatttcgtcaatcagatgagctgtctgcccaatgtcactatcatgggtgacaaaaccggtggcggctccggcatgcctttcacttccgaactgcctaacggatggacagtacgcttctccgccagcccgcatttcaacgccgacatggagcagatagaatggggaatagagcccgacatcaaagtcaatatggacgaagcggatgaagcaaagcatatagacactatcatcgaaaaagcccgggctttccttaaaggggaatggactccggcagtcagcgaataactttctttgaacttttacttgtaaaaccaagaaaacttcttatctttgcaccgcttaacgggaaaatcccttgcgggtgtggcgtaattggcagccgcgccagacttaggatctggtgccgtgaggcgtgtaggttcgagtcctatcacccgcactgattaccttataaaagacaaaaaagaagatgtatcggatacatcttcttttttttttagatacaagggactgcgaagcgcccgcagaagccttccggattatgttaaaaaccggagatatacaaaacgcccaaatcttttttgcattccgattgtttcagaggagacaatcaagttagttatccactaaaaatttatgcaatgaagaaaaaacctaaacattctatggagaaagccttctggctgaaaaatctatttctgatagcatgtttgctctttacggcaactcccggtttctctcaaaacaagacagtgaccggtacggtgaccgacgctacgggcgaaccgctcatcggagcatccgtgctgcaacaaggcacttccaatggtgtcattacggacattgacggaaagtattccatccaagtgccgcccgaagccactttggagttttcctatgtaggcatggtaaagcaagccgtcaaagtaggcaaccggagtgttatcgacgtgcagatgaacgatgattcacagatgcttgccgaaacggtcgtcatcgggtacggcagcgccaagaaacgcgacctcaccgggtctatcaccaacataaaaggcgatgagattgccaacaaacccgtagtcaacccggtagccgccctgcagggaaagatagccggcgtacaggttatcaattccggcaaggcaggagcagaccctgaaatacgcgtgcgcggtacaaactccattaacggctacaaaccgctgtatgtagtagacggcctgttcaatgacaatatcaacttcctcaatccgcaggacatcgagtccatggaaatcctgaaagacccgtcgtccctcgccatcttcggcgtgcgcggcgccaacggtgtcatcatcatcaccaccaagaaagccaaagaaggacagacgcgtgtcaacatcaacggctcgttcggcttcaaacgtgtaacggacaagattgcaatggtcgacgccgccgggttcaaggaactctacaacgaacagttgagaaatgaaggcaatcccaaatttgatttcaccccgtggacgggcaataccgactggcaggatgaaatcttccagaccggattcatcaccaacaacaatgtcagcattacgggcgcttccgccaggcacagcttctacctcggcgccggttatgcctacgaacaaggcaatatcaagcacgagaagtacagcaaggtcacactgaacataagcaacgactataaagttacggataacttcaaagtaggcttccagttcaacggcgcacgcatactgcccgccgatacaaaaagtgtggcaacagctctccgcgcagccccggtagctcccgtatacaatgccgaatacggcttgtataccaccctgcccggcttccagaaagcgcagatgaataaccctatggtcgatgtggacttgaaagccaataccacccgtgcggaaaactaccgcgcatcgggcaatgtatacggccaatgggacttcctgaaaaacttccagttcaaagtaatgtactccatggactatgcttccaacagcagccgcacctacacgcctgttatcaacgtattcgacagcagcgtggaaggcaacgtcgtgaccctcggcaacggtaagaccggcgtgaaacagtccaaggaaaccgaagccaaagtacaaagcgactacctgctgacctacaccaatacctggggcgaccacagcctgaccgccaccgccggcttcaccacctattacaacaagctggagatgctgggcggagaacgtacgcagggcgtaggtctggttatccccgataatcccgacaagtggtacatcagcatcggcgatgcggcaacagccaccaacgaaagcaagcaatgggagcgcagtactgtatccatgctgggacgtgtgctctataactacaaaggcagatacctgttcaacggttcgttccgccgcgacggttcctccgcattctcctacaccggaaaccagtggcagaatttctactccgtcggcgcaggctggctgatgtccgaagaggagttcatgaaagacatcacctggctggatatgttgaagctgaaaggctcgtggggtacgctcggcaatcagaatctggacaaggcctatcctgccgaaccgttgctcaccaatgcctattccgccgtattcggcaagccgtccgccatctatccgggctaccagttgtcctacctgcccaatccccgtcttcgctgggaaaaggtggaagcctgggaagcgggtgcagaagccaacttcttccgcaaccgcctgcacttcgagggtgtatattacaagaaaaccaccaaagacctgctggcggaagttccgggcatctccggcacggtgccgggcatcggcaacctcggttccatagagaacaaaggcgtggaactcgccatcgactggcgcgaccggattggcgactggggctatagcgcaggcttcaacctcactaccatcaagaacaaggtattgagccttgtacaggagggttactcgattatcgcaggcgacaagagccagagttacacaatggccggctatcctatcggttacttctacggttacaaggtagagggcgtgtaccagacggacgaagaaatagcccggtcgcccaagaataccctggccaccgtgactccgggcgacctgaaattcaaggacgtgaacggtgacggtgaaatcaccactgccgaccgtaccctgataggcgaccctaccccgaatgtcacttacggcatcgcccttggcgtaagctataagaactgggagctcggcatcgacatgatgggacaaggcggtaaccagatattccgtacatgggacaactacaactggagccagttcaacttcatggaacaacgcatggaccgctggcacggaccgggcacaagcaatacccaacccttgctcaacacgaagcataccatcaacaatatgaattccgagtactacatcgaagacggcagctttttccgcatccgcaacgtacagttggcatataacttcgacaagaccctgatatccagaatcggtatgcaggccctgaagctctacgtcaacatccagaacctgaaaacctggaaacacaataccggttacactcccgaactgggcggtacggccattgctttcggcgtagacgacggcagctatccgatgcctgccatttatacattcggctttaatctgacattctaaaaacaattcaccgcagagcacacaacccggtgtctgctgcgatgaaccaaaaaataataatcatgaaactgaaacataagattctaactctgatagcaggtacactcaccacctttgccctgacatcctgcaacgacttcctcgaccgcgacccgctggggcagttcaccgaagacgatgctcccaacgcccttatcggcggaaagatgtacaacgtatattacctgatgcgcagctataacatcactgccggaatacccgccttcatgatacacatggtacgtagcgaggactccgaaaaaggcagcgatgccggcgacggcgccgaccaggcagccatgtgggacgacttccagtatacagcctccaatggtacgctcagtgcctattggggacagaactataaaatcatctaccagtgcaacgaaatcctcgacgacctggagaacagcggaaacaaggatgatttggagaatgtacgtaccaaaggcgaagccctgttcttccgcgcctactgctacttcaaccttgtacgtgcctggggagaggtgccgctggtaacattcaaagtgaaagaggcatccgacgccaaccggcccaaaagtaatgtgaacgagatatacgaacagatagacaaggacctgaccgaagccgagaaatgcctgccgctgacatggacttccgagtacaccggacgcatcacctggggagccgcccgctcactgcacgcccgtacctacatgatgcgtaacgactgggacaatatgtacgacgcttccaccgaagtcatcaagtccggcctctacaacctgaacacacccgtagataaagtcttcaccgttgagggcgagaactgcggcgaaagcgtgttcgaactgcaatgcgaatcgaccgatgccctgaaaaacagtgatgtcatcggaagtcagttctgccaggtacaaggcgtgcgcggcgcaggcgattgggacctcggttggggctggcatatgggtactgcgctgttaggcggggcattcgaacccggtgaccctcgcaaagatgccaccctgctttatttccgccggagcatcagcgaccctgtcactccggaaaataccaacaagccttacggtgaatctcccgtatccaccgctatgggggcttacttcaacaaaaaggcgtataccgaacccgaactgcgtaagaaatataccaaagacggtttttgggtaaacatccgcattatccgctacccggatgtattgctgatggctgccgaagccgccaacgagaaaggtattccgggagaggctatcgattatctggagcaggtccgcgcccatgcacgcggtgcggacagcagcatactgcccaaagtcacgtctactgaccaaagcacactgcgtgatgccattcgccacgaacgccgcgttgagttggcattggaacccgaccgtttctacgacctcgtgcgctggggtattgccaaagaggtgcttcaagctgccggaaagaactatcaggacaagaatgccttgctgccattaccgcaagaagaaattgacaaatcgaacggggtgctgaaacagaatcctgattattaacgataattagtggttagcgattagtgattaataccatacggcatgataatgcacctaaggctgaaagctttttatctacaagcccggggtaatataccccgggtataaaaagtcctctatgacttgtgctctgttaggacaaatgatttatacacaaggaattcgcctttatagagtgcatattaatacatctgtaatatgaaagtgtgtcaaaaccaagattcgcttactattgatttctttttaggtacagattacacagaaaacacagattttctttattctttttccgtgaaatccgtgtaatccgtgcctaaaagaaatcgtcaagtgtattttgacacacttctcttgaagataaaagcctttcaggctttcacttagaaagacctatatgcattatccatgcttaaaaagtatctataaaagcatatgcaaaaacatgtgtaaagaaccgtattagaaaatacatattaaaagaaacatattatgaagaagtttttcaaaagaaccggtctgctacttgcagccgcctttataggcgccgccgccatgcaggcgcagaaatctcctcaagacatggaccgctttatcgatgctctgatgaagcgaatgaccgtagaggagaaaatagggcaattgaacctgcccgttaccggtgaaatcactaccgggcaagccaaaagcagtgacgtagccaagaaaatcgagcaagggctcgtcggcggacttttcaacctgaaaggagtggacaagatacgcgacgtgcaaaagctggcagtggaaaactcccgtctgggcattcccctgctcttcggcatggatgtgatacacggttacgaaaccatcttccccatccctctggggctttcctgcacctgggatatggcagccattcgggaatccgcacgtattgccgccatcgaagccagtgccgacggcatctcctggacattcagcccgatggtggacatcagccgcgacccgcgttggggacgtgtcagcgaaggcagtggcgaagaccctttccttggcggagcaattgccaaagcgatggtatacggttatcagggagccaacctctccgaccagctcaagcgcaacgatgaaatccttgcctgcgtcaagcacttcgccctctacggggcaggcgaagcgggccgcgactacaacacggtagacatgagccgcaaccgcatgttcaacgaatatatgtacccctatgaggccgccgtagaggcaggtgtgggcagtgtaatggcgtccttcaacgagatagacggcgtacctgccacagccaacaaatggctgatgactgatgtgctccgcaagcaatggggcttcaacggctttgtagtgaccgactttaccggcatatccgagatgacagaacatggcatcggcgacctgcaagcagtttccgcccgtgccctcaatgccggggtagatatggatatggtgagcgaaggatttgtgggcacactcaaaaagtccgtcatgtcgggcaaggtaagcatgaagaccctcgacacggcctgccgccgcatcctcgaagccaagtacaagctgggactctttgacaatccctacaaatactgcgacccggagcgtcccgcacgcgacatcttcaccaaagagcaccgcgccgccgcacgccgcattgccgccgagagcttcgtattgctgaagaacgacagcatcgggctacatcccggctctctgccccaaccgctgctcccgctgaaaaaagaaggaaccgtagccgttatcggtcccttgggcaacacacgcagcaatatgcccggcacatggagcgtagccgcccgcctcaacgactatccttccttgtatgagggactgaaagagatgatgtccggcaaagtgaacgtcacatacgccaaaggcagcaacctcatcggcgacgccgcctacgaagaacgcgccaccatgttcggccgctccctgaaccgggacaaccgtacagacaaagaactgctggacgaagccctgaaaacagccgccggtgcagacgttatcatagccgcactcggcgaatcttccgaaatgagcggtgaaagctccagtcgtaccaatctcgacctgcccgacgtgcaacgctcgctgctggaagccctgctgaagacgggcaagcccgtagtgctcaccctcttcaccggacgtccgctgacgctgacctgggagcaggcgaacgtacccgccatactgaacgtatggtttggcggaagcgaagccgcctatgccatcggcgacgtattgttcggagatgtcaaccccagcggaaagctgacgatgactttcccgaagaatgtagggcaaatacctctattctacaaccacaagaataccggacgcccgctacaggcaggcaaatggttcgagaagttccgcagcaactacctggatgtggacaacgagccgctttatccctttggatacggcttgtcctacaccactttccggtacagtgacattgctctgagtaccccgtcgatgggacaggacggttccataaccgccgcagtcaccgttaccaacaccggcaaacgggacggagccgaagtcgtacagctatacatccgcgaccttgtaggaagtatcacccgtcccgtacgcgaattgaagggctttgaaaaagtcctcctgcgcgccggcgaaagcaaaaccatttccttcaagattactccggagctgctacgcttctatgattacgacctgaaccacgtagccgaacctggagatttcgacctcttcatcggtggaagcagtcaggctgccgggacggctcgtattaccttgaagtaaacccgcggtttctcctgaggatactgacagtttcgccaaaggaaacgcgcagttccctcaggggaaaccggaatttcccactaaggaaacgggagtttctccctaagggaacgggcgtttccttacggggaaacagaattctcccaacagtatataaatcattgcacgtaaaacagaatgaaatcagtaaacctatatatcccgcttctcctgctgttgttccttgcaggagcctgcggtacaaagaaatccgacggtgcatccggagcattgagcgacgacgccctgctggacaccgtacaacgccggaccttcaattacttctgggacggagccgaacccaacagcggactggcacgcgaacgcatccacatggacggcgtatatcccgaaaacgaccaaaatgtagtgacatccggcggcagcggtttcggcatcatggcagtgcttgccggtatccaccggggctacgtcacccgtgaagaaggcctggcacgtatggaacgcatcgtttctttcctcgaaaccgccgaccgctttcacggcgcctacccccactggtggtatggcgatacggggcgggtaaagcctttcggacaaaaagacaatggcggcgacctcgtagaaaccgctttcatcatgcaggctctccttgccgtacaccaatactatgcaggcggcaatccgcaagagaaagccctcgccgcccgtatcgacaagctatggcgggatgtagactggaacttctaccgccagggcgaccaaaacgtactctactggcattggagccctgaatacggctgggagatggacttccccgtgcacggctacaacgagtgcctcatcatgtacatccttgccgccgcctcgcctacgcatggcgtgcccgccgccgtataccacgaaggttgggcgcagaacggcgctatcgtcagcccgcataaggtagagggtatcgaactgcatctgcggtatcagggcacggaagccggtcctctgttctgggcgcagtactcgttcctgggactcgaccccaacgggctgaaagacgagtattgccccgattacttcggcgaaatgcgtaacctcacgcttgtgaaccgcgcctactgcatccgtaaccccaaacattacaaaggcttcggaccggactgctggggactgaccgccagctactccacagacgggtatgccgcccactcgcccaacgagcgcgacgaccagggagtcatcgctcccaccgccgccctttcgtccatcgtatatacaccggagtattcgctgcaagtgatgcgccacctttacgacatgggcgacaaggtgttcggcccttacggattctacgacgctttcagcgaaacggacaactggtatccgcaacgttatcttgccatcgaccaggggccgatagctgtcatgattgagaattaccgcagcggactgctttggaaactctttatgagccatccggacgtacagcagggattgcggaagttaggattccaattgagttctgacacccccatttccgcttcataaccgggattgcgatcctactgaacgctattgccgcctccaccgccctttacatcatcattgctgatggaacgggcggctttcttgacgctggctttcagctcgccgatacggtaactgacactgatgccgaagcgctggcggctgtacttgctccagctctcctgcgtaaaaccaacaccttcgagcgtattggtattgtccatgtacttcttaaagaagttgctggcaaaagcagagagggtcagacgcttgtcgaagaaagacttgtttacgctcaagccgtaatcgaagtaactgctccctttaccctgtaacattacccagggagtctggccgaacacgttcagactgatgcgccagtcatggggcagggtttgttgcgcacccccgtaggcaaaaagattccaaccgtcgtttttaaggccgttggctccttccatatatgaatagttaccgtagatattggcatagatacgggtattggatgtagcattccagttgatataaccgctaagactcgcattcttggtttttcctatgttctgataagtggagtaaagcacctctttgccggtagtctctttcaaaccctcaatctcggtatcgggaaccatttcggagatttgctcaatgctgttgttggtaaacgaatagcggagcgataggttgacattgaacttctgcgtaaaattactgtaactcagattgaaggcatggcttttctcactatccagattgggattgccttgcgtgatattggtagggttactgtcattcaggtagggattcagataccagatgcccggacggtagatacgcatgttataacccaaacgcaagttggacatatccgtcagtttccagccgatgctggcggaaggaactacatcgtcgaaatccttcttgaagttatcgcctttgcctaaaagatacttcacattctgtatggtatgctcgtagcgcacgcccagcctgccggagagcttcttcactttcaaggaataaccggcataggcagccagaatatcattcaggtgtttgtagtgggaactatggtcttcatcgaattcataatcggtctgctgccctgcggcgcgctggaagcggtcgtcctcggcagtattgttgcgaaggatgtatttaactccggtttctactgtgtgcatcttgcggatgggagtcgtataatcggcctgtaaggtgtgctccgtagtgctttgcgaaccgtcattatgctggtcgagcatgcgcttcataaagtcctgccagtccggggccacattgtccatatcgtactcgtagccggaataggaatccgaggtctgcgggcgggtattaatcttatacgagaacgtgagcatacgctcctttacgggaaacagacgctggtagtcgatacctccgtcaatggaataccaggaacttttactgtgactattggagacatagttgtacagttcgttggcagtaccggggaaggtggccagcgtattggtcgttccgtcactcttgttcttgccgccccaaagtccgaaggacatggttaccagccgcaatgtgtcgatttcatagctggcttccatactgcctgactggaaagaaccgtctcccttgcttgtcccgctgtaatccaggtcggacgaactgctgtccgtttcgccgacggtacgccaattgccgccggagtagctgcggggctggttgttatagttgtaattataacgggcgctgaaagtcagtttgccgctttttattgtaccgaatacacccccaccggcgccacggttactgacattgccgctgaacgtagccgtatacccttccagtccgccgcctacggtaacaatgttcaggatacccccgacaccttccgcatcgtactttgcactgggattggtaattacctctatgtgcttgatggagttggcgggcatacttttcaggacttccgtaggattattactcatcatgttgttgggcttgccgttgacatacaccttgaaactgctgctgccgttcaccttgatgttgtcttcgccgtccaccgttacaaggggtactttgcgcagcatctcaagaacagagttcgacttggaatcggggtcgtcctgcacgttatattctatcttgtcgatatctgcctttaccaacggcttctgggctacaatctccacctgtcccaactcattggaagcatctgtaatatacatggtaccgaagtccaccgacttttctcccggttttacggagaagttcttcacaatactgttccgtcccaccgaagaaattgtcataatgaagttgcctttattaccgggtactttctcctggaagtgtcccttcatatccgtcaccagcattttcaacgcatgttccggcgcttctttcttaactattttgattgtagcgtacggctcgccttctttagtaagagaatcgagtaagatacccttaatctgaaaggaagagtttgccgcattctgtgcagttgcccaaacgggtattaacaataccgccagcaacatggcccatctgtttttcatggtgtttccctgtttaaatctataccttgtctgttttttcgtagcagatagtgtctactgtcacaacgaattaggcaaagatagggcattcttcggcatttatcggaacaccggagttaaaaaaagcgaaaagcacattgatttacagaaagtagaaaaacagcagcaggagcacattggcggcaatgttgcttactatcgcctgcatgctgcaagctgttatgcatcactctgtatagggtacaatacttattcctgaaattcggtctcaacagactaaaagacgaatatttcccctgttacttcggcaaaatacacaatctgatacttgtaaaccgcgtctactgcatccgttctcaaaagcactacaaagatttcagctctttatgggttccgtaccattttcagcaaaacggacaactaatatctacaatgttatctcgtcataaaccaaagcccgataaccataataattgagcattattgtagagggctgttatgaaagctcattatgaaccatccaaacacggcaggagttacggaaatcagaattcacacctatcaaacaaaaatacgtaacccaaactaaataaaaacactctccctaactttccataccaagatataattttacttagaactgaatgacttttaacataaacagcacttaacgtccattctcatcactgacttcgatactctttaggtgaccctccatattgtttgaaaaactctcgataaaaataagatttattggagaaaccacatttaaacataatctctgatacagttagccttgtagtcctcaataatttagctgcatgttccaatctaatactacggatgaactcactcggagtcttatccattatctctttaaacttacgatagagagtagccttactcacacctacaaaatcggcaatggtagaaggactgagtgattcatcgtcaatgttactctgaataaagtctgtcacagtatgtatcaactcttcatcctcaggatggagtacaatgccgttcctcactttgatggacgataaactggaattaaaataatctttcaacaatgtctgcctagacagtagattctcaatagtagatattatctgtttagggtgaaaaggtttagtaatataagcatcagcaccatgcttgaaagcatttatttggtcttctacagaagcctttgccgagactccaatgattgggatataacttgtcttgagttctgacttaagtttatttatcagtgtcagtccatccatattaggcatcattatatcgctaatgataatatcaggatgattatgctctatttcacttaaggcttcaataccatctcgggtcacgcgcacagtgtactcaaagagaatatcacataacagttcacaaatattcttctcatcttcaacaaccaatactacaatttccttatgaatctttgaaagctctgctttcacctcttcttgaggtacagtatcatcctcatccagcgcagagacctgtaaactatcagatgacaatgaaggaatcattacggagaattccacatacttccccaattcgctatttacgcttatctcacctccaagtagttcaacgagttgtttagtgaggttcaaacctataccattactaactgaattaccaaactttgcaacatcaaatatcttgtacttgtcaaatacttccgccatttgctgctccgtcaatcctttacctgaattacgaatcaatagatgtaatgtactgtctggatcatcctgcgaaagcatgaccttgatgtagccattacgcggtgtatatttaaaagcattggacagtaagttgaatataatcttctccaaagcattagaatccgaatatatttttgccacgttttgcatcactatcttaaaatcaatcttattatcccgaagaatatcaatataattatctgaagcatactccacgagtgtctttacatctatatacttcggatgcaaactcatattccctgaagctttgcgaaattccatgagttcactaattaacttctgcatccgttccgcattattcttgattatctgtaaatatttccttgtattctcatcgaatccatactgttccaacaaatgttgagctggagtgtaaatcaaggttaagggagtaaagaattcatgagcaacattagtaaagaaattaagctttgattcatagtttttctgttcatgttccctttctacgcgagcaataagaacctgacgactaaggcgaatgcgattcttcactaccgattttacaatacaaaagatgatgacaatcaatactccatagatagttaaagccggcacgctaagccaccatggataaccaactttaatcgtcaggcgatagatatgattcccccaaactctgtcaccattagtacattttacttccaaatgataattaccggagggtagatgagtaaaaatgagactaggattatttcccatctccacccaatcatcagaatggttcttcaaacgataagcgtattcacaattctcgttatttataaaatctttagctatgaaattaaacgatacaaaacgctcttcataacctaattttaggatacctttctctatacgtttgttaatatcttgcagtgtattatatatctttagagtattcaaagtaagaagtggattaaaatcccttttatgtatattttggggattgaaataattaagaccactcactccaccaaagtacagataattacgcctatcttttaaaaaagctccatcagaaaattcatcattctgcaagccatcgttcagagtgtaattatcgatcttaccattagtgatattcaagcaagagagaccttgattagtacttatccaaatattattctttgaatcttttaatatcccatgaacagttttgttagtcaaagtcccatcaacgtacttagtcaaagtgaagtcgttgttacaaccttgtaacttattaagtccatagctggttcctatccaagtgtccgaatgatcttgaaacaaacaaagtatatcactattagtaagtagaatacgactatcaatatcttccaaagtcttgatagcattgttttttaagttaatccaatgcaatcccccaccacgagttccaaaccataatgcctggttttcaggattggacgcaatagcataaactacatcgttactcagtgaaatacttttatctgatgaattgtactgacggaagccttttaccctatatctaccctgctccttagaaatctccatctttatcagcccataacctgaggtgcctatccacattaatgaatcgttgttagtaaaaaagatgttgtataccgctttaaatattggatatttatctggtatgtccagcctattaagtcgtccggtaaccgcatccaaaatattaatacctacaccttccgttccaataaaaatatcattggctctattcttcctcaaggcataaacagaattagatattagcccttgagattcatctaaataatcacgtattgtcttagtatcaggatttaacagttttattccatttccttttgttccaacaaggatattaccgatagtatcttcacaaaaacatcttacaggatgagtagtatgaattgtctgaaacaatgagtcataatgataaaattgtatcaatccttgcccatccgtacctatccataagatattttggctaccaagataaagagtaaatacagataactgattaggcaattcatccagataagtatgagtatcagattttagatcgtaaagaatacacccaccttctataaaactgatgtacatcacatcaccagataaaaggacttgagatacaggcttacttatgctaagccgaatagaatgagaaactgtaaagtcatgattcagtatgaaaagtctgttcttcccgttcaaaacaaatcgaccgccactctgaaacaagctattcactggaccatccatgccaatagacagcaatttatccttctttccctccttaataaattgcctataagaaatatgagcaatagtaccgtcttccaaaagaaaaagcaaattatccaatttatctatggagaaatctttcacctcagttacaaaatcagttttgacaaaattgaattcatcaatagaatcatcatatataaagaagcccactccctttacaaaacaaacaatttcacttccagcactctgtgcaagaataaatgacttttcctggtagggaatcttgttatctttcctcaaataataccttgttatctgataggtttgcttgtccaaacgattaataccattatctgtagctatccataaacagttttctttctcaattatctgacgaataatattattgcttatagagttcggatcacttttactatacctaaacgttgtgatttctctcccattgtacgcattcagtccatcccatgttcctatccacattgtattctcggagtcttccaaaatacagtttaccgaattattcgtcagcccatttatattagagatatatctcaccacattagaagcatatagattctcagaggtaaaaaataaaataagtagaaaatgaattatttgtgtaaataaagatgttttcatgtataatattcctgtttaagcatttaggataaaatgcaaatatatacatttctccaataacaacgagtattatgatcctacaaaggctaaatgaagatatttattccttctagtactgtacccttaaaagattatctatccttgacaacgaataacccctagaaggaataagattacacagattcgtcctatatgtaatctgcatctaaatgacaactaatccacttctgttctttttagcaaacaagaatcaacagactgtattaattattcgttaatgctgcttcaagacatacttaaaatatcccgggtcttgtaatggtgagcgcataccggcaacttccaatgctctgagaacaaaaacattccaagaaaaaacccttgtgctaggccaccaacagccggatacgcttaaatcataaggcaaaaactcatggctaaaaggctcatccggatgaagcgtgatctctacggcaagtcggtctttgattcgttttttagcatccttccatccatgtttcaatccagctacatatccgcaaacctcttcacgcatccaactgccagcattataatagataccattatcccaaaacatattgggtgaaaaaggtttgttctccatagtgaaaaaagtatctttttcatggaaaatcaacggtgaatatccattctttacaggaactttatccagggttttgacaaccatctctgacgtcagtataggtttatcaaatagccaccacgatacaaactccggcaatagagaattgaatgtaatagaataaggatatttacgattatcgatcagatatcctctcttcttgtcatagaaagccctatattcctgattagctttctccacatatttttgagaaacaggaagtcctagttccttcgctacttggagagtaacggcaaacatcccctgattaacagccaagtcggatgtcttatccggatattccaccacatcattctgtcccaatacaaactctgcagcacaaataccgtctccatcagggtcgtactcattgatacaaaaattgaaagctttctttatcttatccataggaatgggtgtcccatataaccgatgattaaccaaagcaaaccataagaattcaagcgtggcatcattaccctttacttccctacttcccatgcaaggagtaataatagtaccgatagctcctcgtacatcttgtgttgctgcccaagcatcaaatatttcctcagaagcatctttatcatatactcccataagactccagaaagaatctctattatacatgtcaggagcataattaatacttggaacattcaagggagtaaaattgtttcgacttgtaatccacatcagcatctgataacaagcatacaagcacttctcttccgtagtacccttaaagcccagtccatccgccaaatagacttgagatgttaaacgaagatcatgtaaagtaggctgagccggtgtggcaaaaatgaagactctcttaacctctttcttattctgtttcaaacagtgataggcatagttatgagcatctgaacggatgacttccaaatctgttatttccaaattaaagtcacttcctttctgtaaggaagaagctgcaatcaacaggtaagtaagctcctgctctgtgtttgctataaaaactgtttcttcttgctgcacccaatctgctgcagaagaaggcatatccgtttgataatgcagtcctgcaacatctatactgcccgttccttcgcctttccacaacttcactgtgatgggatttgcagagcgatgtttaaaacgaattgta

SEQ ID NO: 462 - DNA, 48504 bp, Bacteroides stercoris
  source 1..48504: mol_type = genomic DNA
gatttcatacatcggtatgcagactcaggaagtggctatcaaaccgaacttaaaagtggtattgaagcttgatactgaggtgcttgatgaagttgtcgttgttgcttatggtactgccagccgccagtccattacaggtgctgtagcttctatcgactcaaagaaactggagatgcgccctgttactgaagtaacgggaactttggaaggtgctgctcccggtattcaggtgaataactcatatggcgagccaggtagcgataaatccgaaatccgtattcgcggatttggttctgtaaacggaactaatgctcctctgattgtcgtagacggctctccttatggcggaagcttgaatgatatcaatccgcaggatattgaatctatttctgttctgaaagatgcttcatctgccgctctttatggtaataaggctgctaatggagttatcatgattaccactaaaaaaggtaaaagtcataagttgaacttccggattggtgtgaagcagggtatgtatacccgtggtataccggaatatgacaaattgggcgtaaaccaatggatggaagctatgcgttccggtatgcaaagctattgggaaaaagacggtggagttactccgcaacaagcattcgaagcatctaaaacagtcaatgatgacattgttttttctcctatctttgataagaacggtgctgccatgttcgatgaaaatggaaagttcgtagcaaaggtaaaacccggttacaatgatttggattggttgaaggcattggagcgcacaggttatcgtcaggaatacacagccagtgcggatgctatgggagaaaagtatgatattttctcttctttcggctatttgaatgagaaaggatatatcattggctcggattatgaccgtttcactgcacgtttgaaggctaactatcagccgacttcctggtttaaaacaggtgtaagtctgagcggaacaatgtccggctctaattatcaggctaatgctcatgatgcatattttgctaatccgttctatacagccggtcagatggcaccggtctatccttatttgatgcataatgaagacggaagcgtggctacagatggcaccggtaactcttatgatataagtaactatgattatttgggtggtcgtaatattatttatgagattcagaatgatatcagccgtaaggaacgtaatgccgtatcaggtcagatatatggtacgatttctttcttgaaggattttgcggctactgtaaggggggacctctataatgtaaataacacggaaaaagccttcaataacccctattgcggtgacggtgctgctaacaacggccgtctttcaaaagtacatgaccgtacacgcgaataccgttttacacaggaactgacatgggctcacgattttgataagcaccatatcgatgtattgctggctcacgaatctttcaagcactcctataattatgatttcatgatgaaggaacagatgaaagtcagtggaaatacggagatgagcaattttgcaaaaatgacaagtatcgatggttataaccaagaatacactacggaaagctatctttcccgtgcacgctataattttgcggaaagatacttcctggatgcttcattccgtcgcgacggttcttcacgtttctccgatccgtggggtaatttctggtcgctgggtgcaagctggattatctctcaggagaagttcatgaaagaccttacatggattgataatttgaagttccgtgtttcttacggtgaagttggtaatgatgccggtgccgattattatgcttacaaggaactgttctattcggatgtcaatgccggtatcggtgcgttctataaaattcagatacctaataagaacttgaaatgggaaacttccggttcattggatatcgcgttggaaggtcgtttgttcaaccgtttcaatttctctttggatttcttcaataaaacatctaaagatttgcttttcacggtttacaatccgctttctgccggtgcaaccgactggtttgccacttctgacgagacgccgtccggaatgtcacaatattttgctaacataggtagtgttcgcaataccggtcttgaagttgctatggatgtagatgccatccggactaaagattggaagtggaatatcggtttgaacctgactactatccataacgaaattacaaaattgcccggcggtaaagacattctgcatggaacacagaattacagtgaaggacacagcatctatgaattctatacttatacttatgccggagtagaccaaatgaacggacgtgcgctttataatgcaaactcacagctgggtgaaagtacaatcaatgctttgaaagctcaagatgagtatgttactatcaacggtaaaaactacgtgtacaatacatcatatgccgaaaaagaatggcaaggcagtgcactgcccgatgtatatggaagtatcaatacctctttgacatggaaagacctgacactttccgtactctgtacatattcattgggcggaaaagtatatgattataattatcaaggattaatgtatactacgactaatggtccgggagccttgcataaggatgtgctgaatggttggcaagctactccggaaggtatgaccgaagattctcccaatcgtttgaatccgaacggtacgcctcagttcgacctttcaagcttggcttctacttcttatggtgcaagttcacgctggctgacggatgcttcttattttgttatcaaaaatatcaatctgaactattctttcccaaagaaagtcgttacgaaatggggattgggtggattgagcgtttacggttccattgaaaatgcggctacttttacggcgcgtaagggtatgaatcctcaatatagcttcaccggttctcaagataatacattcgttgcggcacgtgtgtttacgctcggacttaatttaaacttctaaaacgaaacagattatgaaatatacattcaagaacgtaatgatattaggactcggctgtctgttgggatttacctcttgctcggacagttggctcaatacagactccacgcagactgcggagggagatgtgattttctctacaacggataatgcaaaacttgttatcaacggtatttgcaggacaatggttcagcaacatgcctattatggacaaaacttcaacggcgaaggtactatgaagttgctttatggcgaatatcccggtcaggatttcaacttcccttatatggcaccgggatggtctccgctgatgaacaaccagtctaccataacccagagcagcagctctatctatgattcttacccctggtattactattatctgattatcggaaatgccaatgcggtaatcaatcgtattgataaagcagaaggttcgcaagaggagaaagacttcttgaaagccgaggcgcttacattccgtgcttattctttcttccgtttggctgaattatattgtgagccttgggcacgtagtaatgatggtgctaccgatggtgtggtactgcgcattaaggaagtggccgaagctggtgaagagacagacttgaagttgtctacattggccgaaacctataagcaggtttatgatgatcttgatgaagcccttagattatatgaggtttccggacttacccgcgatgacatttactgggatgctacctctaatatcagtttcccggatgctccggtggctcatgccatttatgcccgtgctgctttaacacgtcaggattatgccgtggccaaggaacatgcggctttggcgcgtgccaatttccccttgatggacacgaatacatattatagcggtttctgcactcccagcagtgagtggatttggggtgtgtacaatgatgcttccgaaactatctggtattatggatggcagctcttcatggcttgtaacggttactatgcgcagcaaaatatcaatgtatgtatcaatcgtgatttggttgagtcttttgccgacagcgatattcgtaaaggattgttcttgacggagtctacattcttgccggaagatggaagtaaaacattcttggaggttgtaggtactgaaagccgtaatgccaataattttaacaacacagcggagggtcaggccgcttctacgaaagccaataagtatgtaaaggagacagtagcatctgctacgtcacaggcatatgcttatgccagcctgaaattccaggctacggcacagcctgctgtaggttgtcagcccattttccgtgcttcggagatgttgttgattgaggcggaagctaattactatctgagttcagacccgactgctgcacaaaacagcttggttgaattgaataaaaatagcggtcgtgaccctcaatatacgtgcacggttaccggtgaggatttactgaaagagattaagaaataccgtcgtctggagttatggggcgaaggtttcagttggtatgactgcaaacgttggggcgatccggtggttcgtaactcttttaaggaaggcggtaattacagttcgtatattagcggaacattcggatttaaagatggcaactatgtatcggagttctggaaatggattcttccgaaccgtgaaagcgattataacagtgctatcgaaatgaaataaacggaatccgtaaataattaaggcgggtgtgcaaggccgaaagaccggaaggtatgggctggcacatccgctttccgttttgtggcatctggcggcgctcggtggtttacgacaggaatccctatccttattattaaaaatgggaatgaacactatgagaatggttttgttttttcttatatttgccggcacatataataaagatacatatatataataaggtataaagtagaatgaaagaatttgtaatttccgaagcgcaggtcgaaaccgcagtattggtaggtcttatcacaaaaactcaggatgagcgtaagacgaacgaatacctcgacgagctggcattcttggctgagacagccggggcggaagtagtgaaaagatttactcagaagttagaccaggcaaactctgtaacatacgtcggcaagggtaaactggaagaaataaaagaatatatccgcagcgaagaagaagccgagcgcgaaatcggtatggtgattttcgatgatgagctctcggcaaagcagatacgcaatatcgaggctgaactgaaaataaagatattggaccgtacctcactcatcctcgacatctttgccatgcgtgcacagactgcaaatgcgaaaactcaggttgagttggcgcagtacaaatacatgcttccccgtctgcaacgtttatggacacacttggaacgtcagggaggcggttcgggagccggtggcggtaaaggttccgtgggtctgcgcggaccgggtgagacgcagttggaaatggaccgccgtatcatcctgaaccgtatgtcattgctgaaagaccgtctggcggagattgacaagcagaaagctacccagcgcaagaaccgcggtcgtcttattcgtgtggcattggtaggatataccaatgtcggtaaatctactctgatgacgctgctttccaagagcgaagtgtttgcggagaataagctgtttgccacgttggacactacggtgcgcaaggttattatcgagaacctgccgtttctgctgtcggacacggtaggctttatccgtaagttgcccaccgatttggtagattcttttaaatctacgttggacgaggtgcgcgaagccgacctgttgttgcatatcgtagatatttcccaccctgattttgaagagcagatagaagtggtgaacaagacattggcggacatcggtgcatccggtaagcccatgatacttgtattcaataaaatagacgcttacacttatgtggcgaaagcggacgacgaccttacccccagaaccaaagaaaacttaacactcgaagaactgatgaagacgtggatggcgaagttggaagacaattgccttttcatctctgcccgcgaacgtatcaatgtagaggaactgaagagtgtggtttaccggcgtgtaaaagaactgcatgtgcagaagtacccctataacgactttctttatcagacttacgatgaagaggaagtttaattcaatgaagaattgattcttcatttttaatttgaatattatgacttacagaaacttgaccgaagacgaagttcttcggttgaagagccagtcgtgtctggcagatgattgggggaaagtaaccgttgcagaagagttttcaacggaattcgtacatcatacccgtttttcgggtgaggtgcgtttgggggtattccattctgaatttactttgccgggtggaataaagaaacattccggtttgcggcatgtaacgcttcacaatgtaacggtgggtgataattgctgcatcgagaatatccaaaactacattgccaattatgaaatagggcatgatacttttatcgagaatgtagacattattcttgtagacggattgtccaggttcggtaacagtgtggaagtgtctgtcttgaacgagaccggcgggcgcgaagtgcttatcagtgacaaactttctgcccatcaggcctatatcatggcgctgtaccgtcaccgtccggaactgattgcgcggatgaaggaaattaccgatttctattccaataagcatgcttccgctaccggttctatcggtagccatgtaatgatactcaataccggctctatcaagaatgtccgcattggcgactattgccacatttgtggtacgtgtcgtctgtacaacggaagtgtcaacagtaacgagaacgcgcctgtacatatcgggcacggcgttatttgcgataattttatcatatcgtccggttcgcatgtggatgatggagccatgcttacccgttgctttgtagggcaggcctgcaaactgggacataactactctgcctcagactctttgtttttcagtaactgccagggagaaaacggtgaagcgtgtgctatttttgccggaccttatacggtgacacatcacaaatccaccttgcttatagccggtatgttttcctttatgaatgccggttccggttccaatcaaagtaatcacatgtataagctcggtcctatccatcagggtacgttggagcgcggagccaaaaccacttccgattcctatatcctgtggcccgcaagggtgggggcgttctctctggttatgggacgtcacgtcaaccattccgatacttccaacctgccgttctcttatctgatagaacagaacaatacgacatatcttgtgcccggcgtcaatctgcgcagtgtgggtactatccgtgatgcgcaaaaatggccccggcgcgaccagcgtaccgataccaacaaactggacttcattaactacaatctgttgagtccctataccgtacagaagatgttcaagggacgggagactttaaagaatctgcgttatgcctccggcgaactttccgatatttattcttttcacagtgccaagatacgcaactcggctttggtgaaaggtatccgcttttatgagatagccattcacaagtttcttggcaattcggttatcaaacgtttggaaggtatcggttttcatagcaatgaagagattcgtgcccggttgaagcccgatacacctatcggtagcggcgaatgggtggatatttccggactgatagctcccaaaagtgagattgatgccttgatagacggcatagagtcgggtgcgattaaccgtttgaagcatatcaatgccgagtttgagcggatgcaccggaattattatacctacgagtggacatgggcttatgagaagttggaagaattctatggcattgctccggaaaatatgactgcagaggatataattcatattgtcgagaaatggaaagaagctgttgttggtctggaccgcatggtttatgaggatgccaaaaaggaattttctctggcttccatgaccggttttggcgcggatggttcacgtcttgaaaaagaacttgattttgaacaggtacgtggtgacttcgaaaacaatccgttcgtaactgccgttctcaaacacattgaagtgaagaccgcattgggcgatgagctgataggacgtatgcaaaaagtacaatgaagatgaggcggagggatggcaaatccattcgttttatatgattaaaatagagaaagcggggttgaagtattaggtttcaatctcgttttttctttctaattaaagaaatatttcaagattacttcttacctttgctgttacgaaatcacttttaaactaaatgaacaagtaattatggcaacaacacctccgttcaagtatcagcccatgttcgaaaagggtaaggatacgactgagtattatctgcttaccaaagactatgtgtctgtaagcgagtttgaaggaaaacctatcctgaagattgaaaaagaaggcttgactgcaatggccaatgccgctttccgtgacgtttcgttcatgttgcgtcgttcgcacaacgagcaggttgctaaaattttgagtgaccctgaggcaagtgacaatgataagtacgtggcactgactttcctgcgtaatgctgaagttgcctcgaaaggcgtgctgcctttctgccaggatacgggtactgccattatccacggtgaaaaaggacagcaggtatggacgggctattgtgatgaagaagctctctcactgggtgtgtacaagacctataccgaagagaacctgcgctattctcaaaatgctcctcttacgatgtacgatgaggtaaatacgaagtgtaaccttccggcacagattgatatcgaggctaccgagggcatggagtacgagttcctttgtgtgaccaaaggcggcggttctgccaacaagacttatctctatcaagaaacgaaagctattctgaatcccggtacacttgtgcctttccttattgagaaaatcaaaacgttgggtacggctgcatgtccgccttatcatatcgcattcgttatcggcggtacatctgccgagaaaaacctgctgactgtaaaactggcttccactcatttctatgacaacctgccgactacgggtaacgaattcggccgtgcattccgtgatgtagagctggagaaagaagtgctgaaagaagctcacagaattggtcttggtgcacagttcggaggtaagtatctggctcatgatatacgtattatccgtttgccgcgtcacggtgcttcctgtccggtaggtttgggcgtttcctgctctgccgaccgtaacatcaagtgtaaaatcaacaaggacggtatctggattgaaaagctcgacagcaatccgggtgaactgattcctgccgaactccgtaaagccggtgagggtgatgtggtgaagattgatttgaaccaaccgatggaaaatatcctgaaagagctgactaagtatccggtttccacccgcctgtctctgaacggcactatcatcgtaggccgtgacattgctcatgccaagctgaaagaacgtttggaccgcggtgaggatttgccgcagtatatcaaagaccatcctatctactatgccggtcctgccaaaactccgcagggaatggcttgcggttcgatgggcccgacaactgccggacgtatggacccgtacgtagacctcttccagagtcatggcggaagcatgattatgcttgccaaaggtaaccgcagccagcaggttacggatgcctgcaagaagtacggcggtttctatctcggctctattggcggtcctgctgctatcttggcgcaaaacaatattaagagcatcgaatgtgtggaatatcccgaactcggtatggaagctatctggaagattgaagtggaagatttcccggcatttatcctggtggatgacaagggtaatgacttcttcaaacagttgaaaccgtggaattgcagtaaataacggacaatcccgaatatgatataaaagccgctcaggaaactctccttgagcggctttttgtatgatgaccggtggaatataaggctgctaatggaagtttctttttgatgtcgccgttaatcttttatctgttttttccattgttcgtactttttcagcactttcaatccggcattgttataccagctatagccgttgcggcgctcataccctatctcggaaatatcgtacttcttcactccgtcgcggtcgcagaagaaagggcggttgtcttcaagggtatagaaacgtgcccaaaatacggggcaaggatagtcatcctgcgggcaaggaaccatccggtagtctttcttgccttcactgttggtaaagtccttacgcatgatgcccgtaatcttgtttgccttgaaccaactgacggctgcttctacagaagcgataatccggggtgaggggtcggggatggacatcagcagcaggacgatattgtccgattcggcgccgctgagcgagggaagttcgtaggcgcgtgccttggcaggggcaagggtgtgttcatcgtgctgggcgcaccacacagtcagtttgccgttttgttttacctgagtgttgagaatgcactccacacctttgtcgaatgcgatacgggcgcgttggcaaagggtatccggtacataggtgtacggggctttcttgctgtacacatcacgcaacaggttcatgacgttcaccattgcattgtcgttgtaggtgatgtgggtataataacctttggggcgcggccagaactgaggccagccgccgttggggtattgcgctttcagtaggtagcgtatgccttctaaggcagcgtctttgtatttctctatgccggtggcaaggtagatgcgggaaaggtagcgtatctctgtgcttgtggcattgttgtcgatggtgctttggttgacgttatctttgtcggcaagggctttctggtactcatcggctgtcagttcggcgggcatatagatgtttttgggccagccaccggttgtttgctggtagagcagtacgttgtcggcaatacggacagcttcgggagtcgtgaagaaggcatcgtccaatttaggggccagttttacccaatccttataaggatgtttctctttgtagtcggttgttttctgtgcattggcgcctgtaaacaaggcaagcaatgcacagaaaaagattgttcgtttcatattggtattgtttttggtttctctttacgaacaaaagtagggaaaagtttgaagagaagatggcaatatttgtttttaagggagtaaaaattgtaatttatacggtatgtctattccaaatactgttccactctcccgctgatttgcagcagggatatttcgcacaatttggtgtcgtactctgccgataggatacgctcctcggcatccagcaggctcttttgcgcttcgcgcatctcgataccggagaggttgccgagcatatagcgttccatggcaatctcatggttctctttggctgcaacgaggttctgtcgttccagcttcagcatctggagattgttctggtaggcttgccataggttgctcaagtcggcgcgcagggcttgttccagttgctcgcgttccaaacgggcgttttgtacggcaatgcgtgcattgcggagttcgcggcggcggttgccgtcaaagagattgaaacctacggtgacgccgaagttcagcccgaggttgctgcggcggctgttggcggaaatatcatatttgttaagggtatagccgtagccgccattcatctttatgtacgggtagtcgcgggaactggcttttttatagtccagccgtgccagcgtattgttctgttcggctttcagtaaggcggcgttggcttgcaaggtggcattccagagctcatcgaaattcagtttggcgctgacgttgatgaggctgtcttcaacgatgaaagggcggtctacgtcttcacttgccatcagctcgttcagttggatacgcgaggtatgcagtaattcctgttgtttcatgtattgcgcgctgtcggcattgaagtctactttggcctgctggtagtccaggcgggagaagttaccgatgtgataccgttcctctacgatgcgcaggcgctctttggagagcgatacagcgtagcggaagtttttcagacggatggtgtgctgcacgtagttgtagtactcggcggcgatgttggcaatgaggtcttctatggcgatacgggtgttggtttcgccctggcgttccagttctttcagcttttggtagttggcggtgatgttgaagccgtcgaagattgtccagctcaggttgatgccggcatcgacggtctggtcgaacacgccgttttctttggtggtttcaccggtggtgcgcagcttggtttcggtattgtccaaagtacctttatagccggcagacaagtcgagcgtgggcaggtagccggcattggcaagggtggcattgttcttgcttacttgctgttcgttacgggtgatacgcagggaatagttgttcagcagtccctgttccagacaggatttcagggtatagacaggtgctggctgtgcctggacggcaagcgcggtgcacagaatgatcaggaaagataaaagcgtacgtttcattcgttcttcagtttacttcggttggtagatacataactataaatagcggggacgatgtacatcgtaagcaatgtagacacaagcataccgcctactacggccgtacccatggcgatgcgttggttacacccttcgcccgtggcgaatgccagcggtatcagtcccagtacggtagaagcgctcgtcatcaggatagggcgcagacgttgcagggcggcatccttgatggcttgcatcttgtcctcgccggtttcctgcttctggttggcgaactctacaatcaggataccgttctttgccaccagcccaatcagcatgatgataccgatttggctgaatatattcatcgtgatgccgccgaaatacatgaataccagtgcgcccgcaatggcaaggggcacggtcagcatgataatcagcgggtccttgaaactttcgaactgggcggcaagaatcaggtagataagcaggatggccaggatgaaagcgaacatcaggctggaagaactttcgcggtactcttttgagtcaccggtgagggcggtgcggaaagtatcgtccaatgtttctttggcaatcttgtccatttcgtccagaccttgcccaatggtcttgccgtcggcaagtccggcggaaatagtagcggacacgaaacggttatagcgatacaacttgggcggggcgatgccgtttgtcagctctatcaggttgtcgagctgtaccatgtctcccttgtcgctacggatgtagatacttttcaggtcggcaggcttgttgcgttgctgacggttgatttctcccaatatctcgtattgctttccattcatatagaagtagcccatacgctggccgctcagaccgtattgcagtgtctgggcgatgttgcgggtgctgacacccatgatgcttgccttgtcgcggttgatgttgatgcgggcttccggcttgctgaacttcaggtctacgtccgccatctggaataccggattctcatatacctttgccatgaacttgggcagcacttcctgcaatttctcaatgttggtggcttgcaacacatactgtacgggcataccgccgcgccgtccgccgaaggatgaggactgttgtacaaaagagcgtgccatggtctttttctgtacagctttcgacagcttttccgccacttccatttgcgtgtagtcacggtcctgcatgtctttcagggtgatgcgtacgttaccgctaccgctggatacgcgggcggttaccgcttcggcatcggggacgatggagtcgacaagctgattgatatcttccgtgtagtcgcggatgtattcgtaggtaacaccttcggctccgcgcgtgttgatgctgatttgcgaacggtcttccagcggcgccatttccgcagggatatggttccaaagaaagccgataatgagaatggttgccgcagtgaaaggaagtgcaatccagcgtttgcgcaggaaggctgccaaagaacggctgtaaaggttattcagtccttcaaagaacggttcggtcttacggtagaaccagctttgcttctctctctttatcagcagcttggtagccagcatcggcgtaaaggtcagtgcggcaaaagaggagatgatgaccgaaccggatactacgatactgaactcacggaacagacgtcccgtcataccgtccataaatacgatgggaaagaataccgctaccagcgtaatggtggtagagattacggcaaagaagatttctttggctccctcgataccggcctctttcgggggcattcctttttcgatgcggacgtagatgttctccgtcattacaatggcatcatcaaccacaagtcccacggcaagtacaatggcaagcatggagagtacgttgatggagaatcctgccaggtacataacgaagaatgctccgattaatgatacgggaattacgatacacggaaccagggtgacgcgccagtcgcgaaggaacaggaagatgatgatgatgacaaggacgaaggcctcgtatacggtctgctttacttcatcgatggaggcacggatgaatttggtgttgtcgaagccgtaggagtaatgtacgtcttccggcaggtctttcttcatgtactccattcgctcgtacacggcatcggctatttggatgtggttggcgcccggttgcggaattactacgatgcctaccataggcacgccattcatcttcatatagcttttgatgtccgccggaccgagttcggcgcggcctatgtcgctgaaccggacaatacggttgccgtcctctttcaggatgagattattgaattcctctgccgtatgcatcaacccgagtgtgcggatagtcagttcgatggtgtttccctcgatgctgcccgaggggagttccacattctcattgtctactgcattctttacgtcgatgggggtaataccgtaaccggacatcttgatagggtcgagccacaagcgcatggaataacgtttctctccccaaatgcttacactgctcacatcggagattgtttgcagttgctcttttacggtgaggtcggctatttcgctgagttccagcagcgagcgtttgtcgctttgcaaagcaaccatgaggataggcatggcgtctgcatcggctttggatacggttggcgggtcgcagtcgcgtggcaggtaacgctgggcgcgcgacactttgtcacgtacatcgttggcggctgtctccaggtctacggaaagttcgaattctaccgtaatacgtgacgagccctgttggctgacactggagagtgaacgaatgccggggataccgttgatattctgctccagcggttctgtaatctggttctcaataacgtcggcgtttgctccggggtaggagcaggatacggaaatgatgggattgtccaccgacggatactcgcggacaccgagatagttgtacccgatgaaaccgaagagtaggataatcagtgtcaataccgtagagagtaccggtcgccgtatgcttaattcggatatattcatgatatgaagcgtaaagtatgaagtattaaggtataaagtgcaaagtctggaatataaagtataatgtacggattatgagttacatatgccggcatagacttgccatagctcatactttataccttatactttataaaatttcgtactcagttaatgttgtccaatgtcacgggcagtcctgtgcggagctgcaaggttcccgaagtaatgattgtatcgcctatgttcaggccttgcaatacttgcacttcggcttccgtccgaatgccggtagtaatctctaccggttgtgcttttcctgatttataaaggaaaatcttatccttgcccatttccggaacgatggcctcggagggtacggcaagtgcgttttgtatttcgtccttattcagcttgatactggcataacggcccggcagtacggcgctgttggcattgggatagagcgcacggatagtcagtgtatgggtcgtggggtctatctttgattcgcgtgcatagacggtggcatggaaagtgtttagcttgccttcgagcgtgaagtccagtcccgcacctgtctttacgtcattggcatagcgttcgggtactgcaaactctactttcagcggagaaagtttggtgagcttggctacaatggtggagggagacgcgtatgtcccgacactgacctgccgcagaccgatcactccgtcaaagggagcgcgaagttcggtttgtgcaatgttggactctatcaggtcgatgtcggcattcagggttgccagttcggtttttacctgttcgtatgcttccttactgacggcatctctttccagcaacgcattttgacggaacacgcggtcttccgccagtttcaactgtgataccagtctttgtaattgtgcctgaagagggcggtcgtttactttggcgagcaattgccctttcttcacgaagctgccttcttcaaagtttatttcgataatcttgccggatgtctcgaatgaaaggtctacttcctcatcaggcagcaggctgccgctgatttgtatttcgtctttcaacagttgcggtttgattattcgggcatttacgttcagcacctttttgccgccacgtttaccggtcattaccttgtcggcagctgccaattcttcgtttgtcttgggaagctgggaataaatgcctccgcctatcagtccggcaccaatgaatatgatgatgccccatttcacttttttattcatgttgtagtattagtagtatatttagccatagattttgacggaaaatatacccgaaggtttaaaacgggaaaagttaataaaagtgatagggtaatagaacggtaaggcaaacctgccactttattattctcttagtatgctgccctgtatttgccttcttccttatcttccagcatgttcaggtaagaggcgtagcgggattcgctgatgtaatgttgctctaccgcttcgcgcacggcgcagcccggttcgtggcggtgggtacagttgttatagcggcagtcggcggaagccttgaatatttccggaaagtaatgccctatttcttcttcctccatgtcgaatgttccaaagcctttgatgcccggtgtgtcgataatgtagccgtcacccggcacgggaaacatctcggaaaaagtagtggtgtgcatgcctttgttgtgataggcggagattgcgccggttttgatatccagttccggaaggatggcattgataagggtggatttacctactccggaatgtccggagaagagcgttattttccctttgagtttttcttttatagtgtcgactccctcaccggttttggcggatatcttgaaacaagggtaaccgatggtagtataaagattgataagtccgttcaggtagcgaagctcgtcttcgttgtaagcgtctgctttattgaagatgatattaacgggtacacggtatgcctcggccgatgccagaaaacggtcgatgaatgtagtggaggtttccggataattcaccgttaccaccagcatacactggtcgaggttggcagcaaggatgtgagactgtttggacaggttggacgaacgccggataatatagttcttccggtcttcaatttcgttgatgaacgctgttccttcctgattcaatatgatttgcacatggtcgcctactgccaccggattggtgctacggatacctttcaggcggaagttgcctttaattttgcattcaacgtatgtcccctcgtcggtctttaccagataccaacttcctgtatttttaattaccagtcccctcaaaatagttgaaagttgagagttgggagttgaaagttgaaagtaaggagttgttggagaacggtcggtgccgcacggtaactctcggctttcaattttcaactctcaactatatttatactgtcataatctctttatcctttgctgccagcatatcgtcaatctgcttgatatacttgtcgtgaatcttttgcagcttctcttcaccgcctttttgggcgtcttccgccaatccttctttcactgatttcttaaaggcgtcgatggcatcgcggcgtgcgttgcgtacactcactttggcggtttcgctttcgttcttacactgtttggcaagttgtttacggcgctcttccgtcaacgggggaatgccgatgcggataatttcgccgttgttttcgggcatgatgccgaggtcggagtcgatgattgccttttcaatgatgcggaacatgctcttgtcccacggcttgatggcgatactgcgggcatccggagtggttacggctgctacgttgttgatgggaaccatgcttccgtaagaatcgacacggattccgtccagcaaacgaacatcggcttttccggcacggatgtgggccaatgattcttccagatacattacggccatatccattttctcttgtgcttcgtctaagatgtcttttacgtctttcatatttctattgtttgaagtagcttttagtttgaaactttgcaaatataattgtttcacgacagattacacagatttacacagattattttatccgataatctgtgtaaatctaaatccgtatccattaatgtaaaccggcggatgtacgccgaggaatgtcagttatgtaccagcgtccctatttcttcgccttgcattactttcttcaggttgcctacggtgtccatgtcgaagacgatgatgggcaggttgttttccttgcacatgcaggtagccgtaaggtccatgactttcaggccgcgtttcagcacttcgtcgtaagtgatgtcgtggaatttcgttgccgtagggtctttctccgggtcggcggtgtagatgccgtcaacgcgggtgcctttcagcatgacgtccgcttctatttcgatgccgcggaggctggagccggtatcggtcgtgaagaacgggttgcccgttccggcagacatgataaccacttcacctgcttccatacactcgatggctttccatttattgtagaattcgccgataggctccatgcggacggcggttagtacacgtgcctttacgcctgccgctaccagtgccgagctcagtgcaaggctgttgataacggttgccagcatacccatctggtcgcctttgacgcggtcgaaacctttgttggcaccgctcagtccgcggaagatgttgccgccgccgataacgatgccgatttgtatgcccatctcgtgtatttccttaatttgtgccgcatattcggcaaggcgtttctcgtcgatgccgtattgcttttctcccatcaggctctcgccgctgagtttcagtaagattcttttgtatgttgccatagtttattaatttatttcgcttagcggcaaagatagaaaaataatgccaatcggtataaacaaattccggttattctttcaacgtgtagtcgccggcttgggcggtgaccactgcctgtaactcgtcgagtgtcttttcgccttccgaaaactccacgaccgctaccggcgggttgagggttacggtggcatgtacgccttccatactgttcaaggctttttccacatgcatgcggcaatggttgcacatcatgccttccactttaaattcttttttcatgacgttttcagttgatggttctactttattttccggttgtcctgccggggtggcggcagggctttccgcagtctctatctttttccttttcagccgcagactgttggttactacgctgacactgctgaatgccatggctgcaccggctatcattggattcagcaggaagccgttgacggggtagagtacgccggctgcaacgggtacacctattatattgtaaatgaacgcccaaaacagattctgacggatggtgcgcacagtcagtcgggagagtttcaacgcttccggtatctttgtaaggtcggaagaaatgatggtcatcttggccacatccatggcgatgtcgctgccaccgcccatggcaatgcttaaatcggcttgcgccagggctgcactgtcgttgatgccgtcgcctgccattgccactttcctgccgtttttctgcaggctgccgataaaggcggccttatcctgcggcagcacccccgcccgataatggaggatgccggctttgcgtgcaatctcccgggcagtggcttcgttgtcgcccgtcagcatatagacttcgatgccggcggcttgcaattcgctgacggcttgtatggagctttgttttatttggtctgtaatcccggctatggcaagtgcgttttcgctgtcggcaaaccagatgacggtctgtgcatccgctgccaggcgggcggcttcatcgcttagcgaccggctgacggtaatccggttttcttccagcagtttccggttgccggcataataggtctttccgtccgactcgcctttcacacctttgccggtaatactttcaaagttgtctatacttacgtcccgggcattctgtaaatggcggactacggcttcggcaagcggatgttccgataacttttccagactgtagaaaatgttttcatgcgctgccgtctgcgttgcccaaatcaaatcgccgactaccggctttccttcggtcacggttccggtcttgtccagtaccaccgtatcaatctttttggcggtttccaggctttcggcgtcttttatcagaatgccccgttccgcacctttgccgatgcctaccatgatggcggtgggtgtggcaagtcccagggcacacgggcaggcgatgataagtaccgtaaccagcgccagcaatccgtgtgtaaaaccgttctgcccatccagcaacatccatgcgatgaaggacagtacggcaatgccgataataaccggcacgaagatgcccgcaatcttgtctgccaattgctggacgggggctttgctgccttgcgcatcctgcaccatgtggatgattttagcgagcagcgtatccgtccctactttctccgcgctgaaccggaaactccctttttggttgatagtgccggcaaagactttggcgttcttttgcttggctactgctaccggttcaccgctcagcatgctttcgtccacgtacgaactgccttccgtaacgatgccgtccacggcaatccgctctcccggtttcactaaaataatgtctcccggacgaatctgttcaatcggaacaaccttctcagatgagggaccggtgataacggttaccgttttgggttgcagacccatgagcttccttatggcggaagaggtatttcccttagccttttcctccagcaaccgccctaacaggataaaggcgataatgacgcttgcagcctcgaagtagacgtgcggatggatgcccctttccagccaaaattcagggaacagcatgttgaacaggctgaacaggtaggcgattccggtgctgttggctaccagcgtatccatattggcggtgccgtgtttcagttgtttccatgcgctggtaaagaaacttcttcccaaccagaatacgacgggagtagagaacagccacataatgagattggcgtacggcatatccataaagaacatgccgataaccataacgggcacggataagacgatggcccatgtggtgcggaatttcagcgcgcgatattttttgtcgtgtgcctgctccactttatccggtgtattctcatcctgtttaatcagcaagtcgtatccggcattctgcacggcctgctgcagggcttcgggagagcaattttgggagtcatattccacagttgccgttgccgaagcataatttacggttgcttttcggacgccgggctggcggttcagcgtcttttccactcttgcggagcatgaggcgcaactcattcccattacgggaaaggtttcttgaacgatgcttttgtttgtcatatcaatagtagtacaatttatttcttccaggataaacttccggtttaatgggaataaacttgaagttcaataggagtaaacttgaagtttaataggaataaacttttagtttaatgtggataaacttttctatgaaacaaagatacggcaaggaagttgtccgatagttgcaaaattcgggatatgatttataagattctgcttatatttcgtcaagcggcttgcgtttgttcccctttattttcttgaagtgactgggagtcattccggttacatgcttgaattgggcgctgaggtaggagacactcgaatagttcagcatatcggctatttcgttcagggatagctccccgtacatcagcagttctttggcacgctctatcttctgtgcgatgaggtatttttcgatagtggtgttggttgtttccgagaaaagcttgcttaatgcgctgtagtcccggtgcagcttggatgccaggtaatcggactgattggttttcagtccgttgtcatcgtaatgtaccaattcgatgatagcatcttttatctgctctacagtctgtgatttcttgtcgtcaatcagttcgaatccgaatgtttcaagcgaggcttttacacgctgatacgtttcgtcgctgactgcgtcgggcaggacggcgatgcccagttctaccgaaagcgggtgcagccccagttgctcaagctggcttttcaccaccatgatgcaacggttgcagaccatgttcttgatgtgcagtgtgttttcgggattgggtgtaatatcgggcattccgttctttttcgggcaaagataataggtatggtttgtttttgctttcatttgtctgcgaataaatattaatggggtttatggcaacctcatcgtgaaatgcctttagtgaaagcttttttccataaccttccggctgagcaatgtctgcatagcgccccgcatggacaggtaaacaagaaaagcaagccacagggcatggttgcctaaaaccgtgtggaatccgtagtacaccgcaaagaagctgacggctgaggctgccatggagagaagcatgccgcgcgttgccgttgcgccgataaagatgccgtcccagataaaggcggcaattccggcagcgggtatggcaagcgcccaatagaagtaagtgtcggcggcggttattacgttccggtcatcggtcagcagtgccagaaaagcattgcctcccgaggcatagaccagcgtgaacagtacggtcagcccggcgccccatataaacagatgccggacggtatcggtaaatgctttccggttgcgggcacctatgtatcgtccgctcagggcttctcccgcataggcgaaaccgtccatcacgtaagagaaaagggtgaagagttgcatcagcaacgtgtttaccgccaggataatttcaccttgcgaggctcctgccgaggtaaagaataacgtaacggctaccagacataatgtccgcaggaaaatgtcgcggttcacttggaaaaagcgtatcattgcctctttttgaagcactcctttccaaacgatatacttcttcagtttgccgtagcggttcatccacagtaccagccccataagaaaacccgcatattgggcaatcagtgttcccaaggctacgccttccactttcatcccgaagaaacagacaaggctgaggcttgccatgatgttgacaatgttctgcgtaatggctatgtacatgggaatgcgggagttctgcataccgatgtaccacccggagagtccgtatagccccagcatggcgggagcgccccatatgcagatatgaaagtagagtgttgccatttccctgacttcttccgtggggtggataatctggaaagccgcttgcctgataggaacttgcagcaggataaggcataatgccacggcaagtcctatccccaccgaacgtatcagcaggcggacaatttccggcaggtcccgcttgccgtaagcctgtgatgtcatgccgctggttcccatacgcagaaagccgaatatccaataaatgatattgaacagcatgccgcctactgcaatggcgccgatataggcaggagaacccaggtgtcctacaatggctacgtcaatcagcccgagcaggggcacggtgatgttcgatacgatggagggtaaggctatctgcaatatctgtctgtctatgggattcattagcaatgttttatttaagagaacgcaaaggtacgcagaaaaagaaaaaacagtgggaaagattaactatatttctactttcatctattgacgattgccgcggaaatccgtaaatttgtagatgaatttctattgggatatttcaggctgtttaactatatacactttaaaatgaaaaccttgacttttcttttcttcggactcctgctgtgtccgatgacgcttttggcacaatcggcagatgtattgttgcagaaagtggctgatgccttgtcggcaggtaaggacgattatgccgtgagtctgttccgtcaggctgccgatgcggatgcgggacagacggagatgttctattggacaagcgttggaaaagccactgaggcagctccgcggcttgcgcaggaactggccgtttgctacagagacaaacggaattacgacaaggcataccttttttataaggagtggctgcagtattatccggcagatgtttccgcacttgtagcctgtgcagagatgcagatgatgcgcggtgaaacgaaagacgcgatgaaactctatgagaaagtgctggctttggatgctgataatcttcaggcaaatatatttttgggcaactattattacctgcaagccgagcaaaagaagaaaacgttagaggacaactataagaaaatcgtagcgcccacacgtatgcagtatgccggttaccgtaacggattgtcggatatttactccaatgggtatagcaaggctaagggttacttgcagaaggtgcttcaactcttcccgtctaccgaagcggggaagaccttggagcggataaagaaattggaaaaagagatgaataattgacggttcatctcttttcttttcctgcctgtagcaatgtctatttggcggtacggattggcaacttcataagtccgtctggtgcagaacgggtgtctgcctcctgaacggctttggggcccggtatcagaggactgtataacaagacatgccggatgcgtgcccgctgttcgggagtaaattggtcggaatggctgattgcgtaatccatgatgttgtgtgagacaaaggattcgcctgtcaggcaattctcacggttcaccaaattggcaaatgtgaagttttccggttcattcgccgcgatatatgcgtaattcatatcgtatgcttccttattgtaggtgggggtatctgtgcaatagtcggtatcttcacaactgtttcctctttctgtttcggagaatacatggtgtaatcctaaataatgccctaattcatgagccaacgtaacggtaatgtctgctggtttgtatgtggttgccgtactttcttcgttgatgaaccggctgttgatggatacacaataggggaaggacaagttcttcagttccaatcgggatacattgatttcactgagaccggccaggctgttcgccccttttgtggtaaacggcagatgggatattcctaatgtcgttgtattactgccgggctcattggcaaagttgtagaccattatattgatatatctgttggggtcccatacatatcttacatacccttttcccgcagtttcgtttatatcatcattcataaagacatcgcaatctatcggatagctgcccggccatgaaatgtattccactcccggctggtccgtcttttctccatccggacttgcggtggcgagtgtaaaggtaaggttcatgtctgcgttttgcacgctcttcttataaagccggtttactgcgttcaatatttcagacaggcggttggggctgacatactgttgcgcgtcggacttgttttggtaaagcacatggaaaactaccggcagattgtagtgatattgttctatgggtgtatatccagctgcttgagtgatttctatttttctgctcatcttggtagccggtgatgcgactgttactgtaacttttctctctttactgtcggggttggcttctatttgcagggtcaatgtctgatttccggagcctttgcctggagtgacgttgcaccattgtgccgttttggatatttgccactccacatcgcttgttacggaaaccgtcaatgtggctccgtcgccatcgacattgctgaatgacgattcggagagttccaaacagttggtttcattatcttcgcaaccatatacaataaaacttgctataacggctacaattaaggcttgtatcttcatgggtttatatattgatttcatacaaaatgtgttttacaaagataatgtttgccaatttgtctaatcagataatgtattgcacctctttaaataaatattcccgttccttgccgttctcgtcttccaggacaaaacgtccgtcttgctccacacgtagcaggcgggcagagaatttgccgccggcatcttcgtaagggtgaaaacctctgcggcggaatagggagcgggcataacgggcggttatttcggcggtataagtaccgctgtcttccgtctgcaaaccgttgtagtagatttgtacccttttcagtatgtgcgataaaatctcatagcggtcgtgttcctgaccggtaatttgtttcagcgataccgggttgggggcatcactgtgaaactcattctgattgatattgattccgatgccggaaatgctgcgtccgatgaagtgtccggataggtcgttctctatcagtatgccgcatattttcttgtctctccagtaaatgtcattcggccactttatcgtaatttcgtccgaccatctgtccagctcttccttaatggaaagagacacgatttgtgataggataaactggcggcgcgcttccagaaaagtgggatataggacaaagctgaaaagcaggttcttgcctctttccgcttcccaggtgttgccgcgctggcctttgccggctgtttgaaattcggctgtaactgtggtcagttcggcaacggattcttgcaactcattacataactggctgatgtaccggttggttgagtcggtttcatccaacactatcagcggataaggaaacgtttcagggcagggcttcatactcattgcgcatttttttagtgaatttctttattacttcttcgtaggaatggtctatcagatgctttatcagtttgtcatctgcatcactgtccaggagcacctggttccaatacttcttgttgaagtgccaggctccttcaacggcattgtagcggtcgcgcaattccagcgcgtattccgggtcgcatttcatggtgatgcggtcgggagtgttgagattgatgcataaaaacatctttcccattacccggataacgaggaaatcctcaccgaaaggagtatcttcggttgcggcctttttactgaggcaatattcgcgggcggtttctatattcattgtattcaggggttagggttcttttaaaacacaggcgggtaaaatgcttctttgatgtgctctatcttgaaagcaccggcatcgcccactgctgtaatgatgtcgaagcgcacgggggcgtcaatgcggaaatgctttacgtaagcatcggctgctatgacaatacggcgtattttctgccagttgacggcatcttgcggcttgatgtattccgtgttacttcgggtttttacttctacgataatcaatccgttgtccttggtggcaacaatgtccaattccaaacggtttttccgccagttccggtcgcgtatcacatatccgttatgttccagataagccgcaaccgcatcttctccggcttttcccagagcattatgtattgccatagtacaattttctttctttcagtacaaaaatacgttttttctgctttgtttttacagaagtaaagctaattttgcaaagaaatatgagaaagagagacaaaacgtgtgcaaaagcaacaccggaagaacctaaacgcgagcagcgcatggtatgcctgatgagcgaagaagagctgcggattgtggatcgttatctggagaagtataagataacgaacaaatcgcgctggctgagggaaaccattctcatgtttatccataagaatatggaagaagattatcctacactgttcggtgagcatgacatgcgaagatgagaagtggtggaataggatagatgtgcgatgtggaatgagataaacagcaagtagtaagaattatgacagatacggattatatgaagcaggcgcttttggaagcgcaaaaggcaggtgagcggggtgaagtgcccgttggtgccgttgttgtttgcaaagaccgtatcattgcccgtgcccataatctgactgaaacgctgacggatgttaccgcacatgccgaaatgcaagctatcactgccgccgctgctacgcttggtggcaaatatctgaacgaatgtactctttatgtgaccgttgaaccgtgcgtgatgtgtgccggtgccatagcatgggcacaaatgggacggctggtatttggtgcggaagatgagaaacggggataccagcgttatgcaccaaaggctttgcatcctaaaactgcggtagtgaaaggagtattggcggatgaatgcgctgcattgatgaaagacttttttgctgcaaaacgcagataatacttttctgaaaaatttcgctataacaggttaactttgtagtgcggaatacaaataaattatcttacgggataattattgtgtaatgatatggctctctgcaattgttattcttctttgatttcttcgaaatccacatattccccctcgtcctgggaaaacagtttcttgtgcctgccatgtgcggtttcttcttttatccttgttttaggttcttcgttggaagaagagccggattgttgtctgccattgaaagaataccctcttccggattgataatttccattgtcgttccggtaagtgtttgatgagcggcggctacccaagccgaaaatactccggataacagtgccgatgatgctaagtccgataagcaggatggcgattataatgataaataaaaatcctaaaaaatgaaacatgggctaatgtcttttatgtgttcgttttcagcgaacgataatacaacaaccgtgccaagaaaatgtttacttacgctttcctgtgagaagtgacagcaagatgtaccatacaattaccgctgcgaaaccgctgactttcaaaaaaacaagaagcggaatacagataatcaggaaactgaaacttactttgttgtctttccatgagaggctcttgaatttcaatgagaacatcggtatttccgataccagcaaccacgaaaacaagcaaaccaatgctaagagataaagcggattaaagctctccgagataagtatgggatgtattcctgccactaacgacgcccaaaaaagggcattggcaggaaccggtacgccgataaaggaactggtctggcgggtgtcgttgttgaacttagccagacgcaacgccgagaatacggaaataaggaatgctgtgtaaggcatataaggagcgatgaactccatggatgccggataatgcatttctttaaataaagagaacactattagtgagggcgctacgccgaaacttacatcatccgccagcgaatccaagtctttgccgatgggagagtgtgcattcagcagacgtgccatcatgccgtcgaaaaaatcgaatacggcactgaggataatgaatgcaagcgccaggttatagttggcttcaaaagccatgacacaggcgatacacccggagaacaggttcaggcaggttaaggtattcggtatggagcgggtaatgcagtttgccattgttacttgagttttgctattacggtctggttgccggtagtcagttgtccgagtttaacaagaacttccgtacccagcggaaggaatacatccacacgcgaaccgaacttgatgaagcccatatgttcgtcgatataacactcttcgcccggttcggcataagttacgatacggcgtgccatggcgccggcaatctggcgtgccatgatttctacaccttcgggggtttcgattactacagtggaacgttcattgtcggtgcttgctttgggcaaccaggccttcatgaacttaccgttctggtgagataccgacttcacggttccatccaccggataccagttggcatgtacgttgaccagactcataaatatggaaaccatgatacggcggtcatggaaatattcggtttcttcaacctcttccactaccacaatctttccgtcagctggggcaaccacgattttttcagtattttcctggccgaacaaacgtataggacaacggaagaagttcactaaaatgccataaaccacaaggctgataactgccactacgtagaaaggaatcttacattccaaaccgaagtaaagccctgcgtttacggcgagtatcaacaataaactgccggccaatgtatgtgttccttcacggtgaatacgtattttctttaattttttaagtcgacccatgtatcttgttttattctttctaatgcaaattatctgcaaaaataggcttattttgaaaatctaacaagaatttagtcatagaattacagatgttgataactttttgaggaatatttttgttagatgtagcataggtcgtacctttatgctcacttatagaaaggataaatttatgcaggattttgttcatttgcacgtacacacccagtattcacttcttgacggtcaggccagcgtaagccggctggtagacaaggcgatgaaggatggtatgaaaggtatagccgttaccgatcatggcaatatgttcggtatcaaggaattcaccaactatgtcaataagaagaacagcggtccgaaaggggagataaaagacctgaaaaaacggattgccggcatagagagcggtgagatagaatgtgaggataaggaagcggagatagcggcttgcagagcaaaaataacggaagccgaaaataaactgttcaagcccgttatcggttgtgagatgtatgtggcacgccgcacgatggacaagaaagagggtaagcccgaccagagcggttatcacctgattgtattggcgaagaatgaaaaaggttatcataatcttataaagctggtgtcccgtgcatggactatgggatactatatgcgtccgcgtaccgaccgcaatgaattggagaagtatcatgaaggattgatagtctgttccgcctgtatcggtggggaggttcctaaaaagattatcaacgaccagttggaagaagcggaagaagccatccgctggtataagaatcttttcggggatgattattatctggaattgcaacgtcataaggcaactgtttcccgtgccaatcatgaggcttatcctttacagcaaaaagccaatgccaaactgttggaatatgccaggaagtacgatataaaagtaatctgctccaatgacgttcactttgtggacgaggagaatgccgaggcgcacgaccgccttatctgtttgagtacgggcaaggatctggacgacccgagccgtatgctttacaccaagcaggaatggatgaagaccaaggcggagatgaacgagctttttgccgatgttcccgaagcgctttccaatacactggagattttggacaaggtggaatattactccatagaccatgcccctatcatgcctacttttgccattcccgaagatttcggaacggaagaggaatacaggcggaaatatacggaaaaagatttgttcgacgagtttacgcaggacgaaaacggaaatgtcgtcttggacgaggaagccgccaaagccaaaatcaagcgtttgggcggttacgaaaaactttatcgtattaaattggaagccgactatcttgccaaactggcatttgacggtgccaaacggctttacggtgacccgttgtcggacgaagtgaaagaacgtttggtttttgagttgtacattatgaagacgatgggtttccccggttacttcctgattgtacaggactttatcaatgccgcccgtacgcaattgggcgtttcggtgggaccgggacgtggttcggctgccggttcggccgtggcatactgcttgggcataaccaagatagaccctatccagtacgacctgctgttcgagcgtttccttaatcccgaccgtatttccttgcctgatattgatgtggacttcgatgatgacggacgcggtgaagtattgcgctgggtaacggaaaagtatggtcaggagaaggtggcgcatatcattacgtatggtactatggcaaccaaactggccatcaaggatgtcgcccgtgtacaaaagctgcctttgtcggaatccgaccgtctggcaaaattagttcccgataaaattcccgataagaaactgaatcttcccaatgccatcgcttatgtacctgagcttcaggctgcagaagcatcgcccgacccgttggtgcgcgatacgttgaagtatgccaagatgctggaaggtaacgtgcgtggtacgggtgtgcatgcttgcggtacgattatctgtcgtgacgacatcaccgactgggttcctgtgagcacggcagatgataaggaaacgggagagaagatgctcgttacccagtacgagggttcggtcattgaagataccggattgattaaaatggacttcctgggactgaagaccctttccattatcaaggaagccgttgaaaatgtacgtttacaccggggactgtcgttggatatcgacaagatttccattaaagaccccgctacctataaattatactgcgacggacggactatcggtaccttccagttcgagtccgccggcatgcagaaatacctgcgcgagctgcagccgggtactttcgaggatctgattgccatgaatgctctttatcgtccgggacctatggactatatccctgacttcatcgaccgtaaatggggacgcaagcctatcgagtatgatattcccatcatggagaaatatctgaaagatacctacggcattaccgtctatcaggagcaggtgatgcttctgtcccgtttgttggcagactttacccgtggtgagtccgatgccttgcgtaaggcaatgggtaagaaactgcgcgacaagttggaccatatgaagccgaagttcattgctggcggacagaagaacggacacgatgcgaaggtgctcgaaaagatttgggcggactgggagaaatttgcatcctatgctttcaataagtctcatgccacctgctattcatgggttgcctatcagacggcgttcctgaaagccaattatccggcagagtacatggctgccgtaatgagccgaagcttgtccgatataacgacgataaccaaactcatggacgaatgtaagtccatgggcatcaaagtgcttggacccgatgtgaacgaatcgaacctgaagtttaccgtgaaccccgaaggtaatatccgtttcggattgggtgcggtgaagggagtaggtgagggtgctgtgcaaagtatcatggaagagcgtgcgaagaacgggccttataccggtattttcgattttgtgcagcgcgtcaatctgaatgcctgcaacaagaagaacctggaatgccttgcccttgccggtggttttgacagtttccctgagctgaagcgcgaacagtattttgccgtcaataccaagaatgaagtctttattgagacattggtgcgctatggcaaccgttatcaggcagataaggcggcagcggtcaactccctgttcggtggagaaaatgtagtggacatagccactcccgaaattccgcaggcagaacgttggagtgatctcgaccggttgaacaaggagcgggatttggtaggcatttatctctccgctcatcccttggatgaatatgccgtggtgctggaatatgtttgtaacacacacatggcggaactggaggacaagaccgcccttgtgggacgtgaaataactatggggggcatcgttacttccgtccgccggggcatcagtaaaaacggcaatccttatggcattgccaagatagaggactattccgggtcggcagagctgcctttcttcggaaacgactgggtgacttaccagggatacctgggcgagcgtaccttcctttatataaaggcgcgctgccagcctaaacagtggcggcaggacgaactggagctgaagattacctcaatggaactgcttcccgatgtaaaggaaaaactgatagagaagataacaatccttatcccgctcggcgtgctgaacaaggcattggtgacggaattggcggaactgacgaaggagcgtcccggtacaacggaactttactttaaagtgaccgacccggagagcaagatgacccttgacctggtgtcccgtccggtgaagctttccgtaggccgtgagctgatctcttatttaaaagagcgtccggagcttgattttcggataaattaattatctttgcttcactgatggcagtaggcggataatgctgatactgtactgttgaattgatatttaacttaatatttagaagaaatggcattagaaattacagacaacaacttcaaggaaatcctggcagagggtaaacctgtggtaattgatttttgggcgccgtggtgcggaccttgcaaaatggtgggtcctatcattgaagaactggccggcgaatatgaaggcaaagcgcttatcggtaaatgcgatgtagacgaaaacggagatgttgccgccgaatacggtattcgcaatattcctaccgtactgttcttcaagaatggagaactggtggacaagcaagtgggttctgctcctaaaccgacttatgcagcgaaaattgaagcactgttgtaagctggtggtactattaatcctttaaaaatataaaactatgggactggaagacgattttttgaagaatgatctcgatgatgaaaagaccattgagtacatcaaaaactatttgccgcaggagttgaaagagaagttctctgacgatgagttttattattttctcgatttgattgacgagtattattccgagagcggcatccttgatgtgcagcccgacggtgacggatatatcgaaatcgatctgggaaaaatcgtagattacatcatcaaggaagctcataaagacgaaatgggcgattatgatccggatgaaatccttttcatcgtgcagggcgaaatggaatacacggagtcattggaggatgagtaattcacagtttggattataatgaaaaaggaaaggcgcgggatgaaaacctgcgcctttccttttttccggtatgttgtatatcagtctttccgtttatgctaccggcggagtattcagaaaaaagaataccgccgtgccgataagtatcattcccaataccccgtaaaaccagcgtgcttgccggcggcctacattccgtacgacaaactgcgtgttctgggcggtaaagaaccaatcccaatctaagattgcagccagcagggagataattcccgcaacggcaaaaataccctgaacgatgtactggctcatgtagtgcgattagtggttgatgattaacggccggtactaatccagcggttgcagtgtaacttcccgttcaccgttttctatctcttcgatggtgactttcacggtatttcccggcagcagctcttcaatcagttccggccattcgataaagcagagcgcaccgctgtacagataatcttcgtatcccatatcgtacacctcttccagtttcttgatccggtagaaatcgaagtggtaaatcaactctccggcaatttcggaacggtattcgtttacgatggcgaaagtaggagaggtaatgacatcggatacgccgagctcttcgcaaaccgccttgataaaggtggtcttgccggctcccattttgccgtaaaaagcaaacacggtattgtcgcccattgcctcgacgaaccggcgggcggcttcatgaatctggtctaatgactgaatcttgatttccattattttgtatttttctgcaaagataatgcaaaccgagagcataaaaaatgaacgtgctcattttttatgccgaggcgcagcttatcttcgctttttctgcaaagataaccaaaaactttttccccctttacagattgcataaataataatggagaagaagatgatggctgctcccgaaggaacattgagatagtatgaaatgagcagcccgcccaggcaactgaggtaaccgatgcccacagacagccagatgatgcggtgaaacctatgcgaaaagagattggcagtcatctgcgggattgtcagcaatgagataaccagcacgatgcccaccatacgcaggcaggctacgatagtcagtgcaatgaacatcatcagtacatactcaaaggtctgtacgggtattccttgcgaacgggcgaattcgcggtcgaatgccacatagattatcggatgcaggaaaaacgagaagaacaggatgagcagtgctgccagtccgcccagcagggcgatgtcgccaaatgtaatagtcaggatattcccgaacaggtaggcggagaggtcgggtgcaaatccgggagacaggaatgtgaatatgatgcccaatgccattcccagtgtccagaataccgcaatggcagagtcctcgcgcatgtctttccgtttgctgagccattccacgccgaatgccgacagtacggaaaagaccgctgccgacagaatcggtgaaatccccgcatacagtcccaggcctataccgccgaaagaggcatgcgtcagtccgccgctgataaaaaccagcctccgggtgacgatgtacgtaccgataattccgcagacaatgcttgccagcagactgccgatgagggcatgttgaaagaatgtatattgtaaaagttccatgcggcgggggttagtgattatttcttctttctcctacaatcaggaatacttcgtcttttatattgtcgggcagtgcaatgccgcgcagttgcaagctgcgcacccaccctgccacgtcttccgactgcatggtgtagaacacatcacggaactcatcttcctgttcgggcgtatactcgtcgggagcggttccgatgtatttgtccagctcctcgtcgtcatagtattctatcttcttgctgacggcggcgagcaggctctctttttcgcatacctcgtgctgtccgcaacattccgcatccacttcctgcacttcgggcatagcgtccagttcgccattgtcaattttcttctggagtctgcggttgcgtacggttccggctatggcagctacgacggcaagggcaatcaggctaataatcagtatccacatacgttctctttccttgaaaaaaagtgtccttatacaatagaacggacaaagatacacattgttttcgtatctgcccgcttttgaacaggcaaaaagaaagtgtgccggaatgcttttcgaccgtcatgcaatcaggttgtccgcagcggtgcgtcgggcgatgttaatgacagatgataaagcctgcttgcttcaaatcttcccaatagcccggataggatttggatactacctggggttcgtcaatccttatctgcggcagtgcgatacaggcgggggcaaatgccattgccatgcggtgatcttcgtaggtggcgataacgggagcgctttcggcagggcaacgttcaccctcccacagcaggatgctgtcctgctcggaacgtaccgcatagcctaatttacgcagttcggcgataagggcggtgatgcggtcggtctctttgattttgaggctttgcaggccggtaaagcggaaagggatattcatcaggcagcaagtgacgacaaaggtctgcgcaaggtcgggaatatctaccatatcttcttcgagacggtcaacgggcgtccccgcaagtgtgagctgtacccccttgtccgtgtattcggtatgtacgcccaggcgggagaaaatctccgcaccgcggctgtcaccctgataactgtgggggaacagtccgagcagctctaccgtttcctcttcattccctttcggtgactctccactccccgttttccgtttttcattccccctcaacgccaatatctgataccagtaggatgccgcgctccagtcgctctctacagtgaacggaacgtcccggtaaccgccgggatatacagtgatactgttttcggaactccattcggcacgtccgccgaagtcccgtatgagcttgagggtgaggtcgatgtagggacgggaaatgatacagcccgtaagatacaggtgcaacccttggggaagaacagctcctatcatcagcagggcggatatatattgtgaactcacgtttccggcaagcgatatttcacagccttgcaattccgaaccggtgatgcgcaggggcgggaagccctcattgcctgcgtactcgatgtttgcaccgagctggcgcagggcgtctgtcagaatacggatgggccgctgctgcatacgttgcgttccggtaatgatacggacaccgggcgttacgctgaggtaggcggtgagaaaacgcatggccgtccctgccgccatgatgtctatatgttcgggattgccttgcagcgcacgcaccatgacgcgggtatcgtcgcaatcgctcagattgcagagtgtctgcctgccatgggcaagggcgtgcaggataagcgcacggttactgatacttttggatgccggtagccggatagcggcatgcatcggtacatcgggagcggaaacggtataacgcatagttgtatttgttaagttacggtagcggatgactttatactccgcttgcaaaagtaagacaaatctttgggaaatggaaactgttggctccacattcgtgcttttcagaataccggatgcaggcaatcggcgggcagttccacttcgccccagtctatcattgcattgaacaggcggacggtggaataagccggaagttcttccatgcgtatgtccttttccgtaagaatacctttgtccagcagttcggcacgtttggtccctttcagcagaggatgttgcggagtatgccaatggctgccgtcaaagagggcgatgttggcgatgctggtgtcggtgagcagatgccggcgtacaatcagaatatcatcatacgcgccgcgccgggcaaacaaccggttgagcgcactgcggtcggtgcttttgcaggcgtagtcgatgtcgtcggcctgtatcagtgccagtgagcggacggggcgcagggtataaggggtacaggtcacttcctcgatgccgttttgcccgtacactatacgcagcttgtgtacgccgcttccgggaatggcgggcaggtagccggccagttgcagagcggggctttcaggccagaagtgcgtacgggtatcgttcattctccgttcatggtaagccgtattgcgcacttctccgcaatccacccgtatggtttcaataaatcggcacatatattttctgtattacttcgttgtattcgctttcccaacggctttgggcggtgatgccgccaccggctttgaaatagagctgtccgtcttcctgctcgatgaagcgtatcatgacggcgctgtccagccgtccgtcggtgtagcagcccatgactccggtgtagaatccccgttcgtagccttccgcttcggcaatgatttgcatggtacgcggtttgggagcgccggtaatggagccggcgggcagcaggctgaacagaatatcgccgaggcgctttgtgtaatcgccgggtagcatgccgcatatttcggagcttgtctgcaggataggccctttgttggtctgcaggcggtctatgtagcggtaggacgctacggtgacatgttcggaaaccatgctgaggtcattgcgtatcaagtctacaatcgtggcatgttcggcagcttctttggcatcgtccagcaggattgattcggcatggggcagggtggcgtcaatcgtgcctttcatcgggaaggattttatcctgccctcttccatgcggacgaagatttcgggcgagaagcagacgaaccggtctttcagccagagtttgtacagggcgtgtgaatgcaggaacacatctttcagcgtcaggttggtgcggagcggcactttgcatgtcagattggtcaggtagctgttgccgcccagcaggttgcgccttacggtatcgaaagaacggcgatagtcggcgggagcgggcggtgtgaattcccagtctatcgttccggcataccgggcaccagcatcaggtgcattgcctgttcctctgaactggtagaggcatacggacgtatctatcccgtcgagaggttctacgtacgaatgttcctgcatgtagtcgataacaaacaggaagggcgtaccgttgcgcccgaacgtattcatccgggcaatagctgtttctttatccagtgctttcattgtcttaaatcattgtagctatgatttgaatggacagtatgaggaataccattgcaatggggtagaccgttgcgtatgccacgctcggaatattactgtcggtcatggaatcggcggccgccagaccgggggtacttgtcatgccgccggtaatggttcccaagaggtcgagaatactgattttaaacaccatcctgcccacaatcacggctatcagcatgggaaccagggtaatggctgcgcctactccgaacagcagccagccgctttcctggaaggtggcaaccagattctttcctgccgacgtacctacttcggcgaggaacagcagcagtcccaactgtcgcagcagttggttggcaggacccgacatcgaccagatgacaggacccgtcttgcctattgcgctgaggaacagggccactatcaggataccgcccgtcagccccggtgagaacgacaaaccgccgggaaaggatatattcagtttgccgaacagcactccgagcacaatacccattgcaatcgggaagaaatcggtatcggacagtttcttggcgttattgcccaagaggcgcgccagtcctttcagtccttccttttcgcctaccaccgtcagcttgtcgccgaatttcagcgcgaggtcgggcgagggggcaaggtctattccgcttcggcggacacgcgttacggtacagccgaagttcttcatcaggttcaggtcgcccagttgcttgtttatcatatcctttttggtcagcagcagagattctatctcttgggtgtggctgagcgggagttccccttcttcgcgttcgcccaccagggtggcaagctggtttagggcttcgtcactgcccactgcctgtatgtagtcgttttcacggagtacggtgtgtgcggtggggatggagatttgctcgccgtgcttgtggcgggagattacagcaccggttatggcacgggcattgatttgcatcaggctgcgtccgaaaactacggggttcgtgacacggtagatgcaggtgagcaattcgggaaactgtccgcggcgctctttctccaggcggcgggcttcccggtcgaggtcgatgtgcatgatgcggggcagcagtttcacaaacaggataacgccgattactccgaacggataggcgataccgtaggcaatggatgccagcggcgagtgggtgctgtcaatggcaacggcaagtcccggcgtactggtaagcgctccggctatgagtcccaccacgctcggcgtgtcgatgtcgaaggcatatttcagccccgttgccgtgagggcggcggagcagataatgagcagggtgatgatgatgagggtcttccctttgctccggaaggagtcgaagaagccgggtcccgcctgtatgccgatggtgaagatgaacagtacgagtccgaagttacccagctccttggggatgatgacgccgaaatgtccgaatagcagggcgatgaaaataacggcggatacgtcgagtgacaatcctttgattttaatccttcccaacatgaagccgagggctacgatgaggaacagggcgaaataagaggaattgagcaagtctgtgaacataggctttgatgaattaggtcttttcttgggaacaaaggtaatggaaaaaagttagatagggaaggctattttccttttcggttttattgcttacctttgcaggttttaaaagaatgaagaaaaacgttttatggaaattgatttaactacccccgctttgctgttttcggcaatatctttgataatgttggcatataccaaccgttttctgtcctatgccggtcttgtacgtgctttgaaagagcaacatcagaagagtcattcatcggtgacggccgcacagattgccaatctgcggcaacggctttacctgacgcgggctatgcaggtaaccggcatagcaagcctgctgctgtgtgtggtcagcatgttctttatctatatccggcttcatctggtatcggtctatatcttcggcctggcattggtgctgctgattatctcgctggctatttcggtgtatgagatttatatctcggtgaaggcattggagatacatctgaatgatatgggcgattgaaaaggagctgccggaagccccgacatattgttatacaaaaaagagggtgtgtcaaaactaacattcgcttgctatttgtttctttttaggcacggattacacggaaaatacagattttctttgttctttttccgtgaaatccgcgaaatccgtgcctaaaagaaatcatcatttgtccagctctttcagcaattcttctacggcaactttcagttgggtatcttcaccctttacaatggtttcgggcgagttggccactttgatgtccggttccagttggctgttttccaggtagctgccgtcgggcaggcggtaacccaccacggggatgccgaatacgagcgacgggtcttgcagacgctcccaggatacgcttgtcatggttcccggaacgggcatacccaccagtttgccgatattccggtggcggtacacccacggtgtgccgtgtgcattggaatagttggcttcgcaggtcaccataatggaaggcttgttccagcggcggctgggcatgtcgcaggcttcgcggccgcgaaccacttgcgtgaagtatttctggccgctgaacagaatttcgatgtcctcgtgcaggcgtccgccgccattgaagcgggtgtcgatgacgatgccctcgcggttgttgtatttgcccaaaatgtccgagtagacggaacggaaactgtcatcgcccatcgattcgatatgaacatatcccagccgtccgccggaccatctgtccacatctgccgcacgttgtttcacccagcgggtatagagcagggtattcagtgcgccgccgcttatcggaattaccacctcttcccagcgttctttggtttgcgggttgtagagtgagacgaggtttttctttttggctttatcattcaatagtgtgtagtaatccatttcaggggtaatctctgtgccgtcaatcttttcaatgatgatgcctgcctttgctttggttgaggcgttatcgaacggacctttctctatgacttcggcaatgcgcatccctttgtcccggtaattccagtcgaaaagcagtcccaggctggcagtcggttcgctttgtccggaagcgtagtaacggccgccggtgtgcgatacgttcagctcgcccagccattcgctcaacagttcggcaaagtcgtagttattgtctatgtgaggcaggaacttgcggtaggcggcgctcatggcatcccagtctacgccgtgcatgtcggtgttgtagaaacgcttcttctgctgtttgtacacgtggttgaacatatattcgcgttccgccgccaaatccattttggcttgtgcccggtaagtgacaggcttcagctcatcggatgccatattcatcttctgcatggttttgccgcccagcaggaaaaggttcttgccgtctttgtccatttccatggaagcccagccggcatccattttgtgaagcagccgggtgtctttcttgcggagatccattttccaaaggtcgtaaccgccttcaaaggcggcaaagtaataaagggtctcaccgtctttggagatgatgacgctgcccatgtccgaggaattcggggtgaggcgtaccatgcggtcttccatgtttttcagttctacggtgatgtcctttacctgagccttgtcatcgtccgcggctttttcttgtcctgcatctttcttgctgcctttcttacctttggcagtgtccttgctttgcgcttttttctgttcggcttccagctccttgcgcagttcgtagtcttccttgctcaggcagtatttgtcgtaggcgtcctgattgaggaaaacgagcatggcatcgtcctgcgaaccccatgaggcatgagcacgcatgccgtaacgctccgtcttgaagagaatggcattgccgtcgagggcaaaacggggcgaaccgctcatgtagccgctgttggtcaggttgatgatggggctgttgccctgtgcgctgacaagacctatatcggaatacgggtcgtgcctgttaccgatgaattcgagggtgaaccattttccgtccggcgaccaggcatagtcgaatccgccgtctgtgctgtaccaggtggagccatcggtaatctggcgcactttcttcgtatcaaggttcaccaccatgaggcgggtacggtcttctatgaatgccagctctttaccgtcgggcgagaattgcgggaaagcacgctcaacggtggctgacggcaacaatgcctcttcttctacaatggtggcgttcgggaagttggggtcttccttgcggactattttggcaagatacaactgccagttgccgttgcgctcactggcataagccagcgtgcggttgtcgggtgcgaaagacaggccgctttcaccggcaggggtgtgggttatctgtttggttgtggcatagtctgccgaagtgacgaacacttcgccacgggcgatgaatgccacttgcttgccgtccggcgaaacggttgccgaggtggctccgttggtaaaggtcaggcgggctgtatcgggccggtcgtcgcggataatctctatttgtactttttgcggggcggcgccatcctgctgggtatatatttcgccgtcgtaaccatagcacaatgttccgttgccgcttatggagaggaagcgtacgggatgggtcttgaaactgcttaccgcttttatcgcttcggggtgtgccggctgcagggagtacacattgaacgaaccgccgttgcgctcgctcaggaagtacaaggtctgtccgtccggcgagaggacggggttgcggtcttcgcccgcgtggcgggtgaggttggtgtgcttctctgtacggcagtcgtacatccatatgtcgcgtgtaatggaagaggtgtggtgcttccgccactggtcttcaaatcctttttggtcttggtagaaaaacatgtcgcccgttttgtcgaagcagacggcttcggcgggagtgcccaatacctgttcggtgcgtccgccggttgtggggactttataaagctcggtcatggcaggactggggaagagcgcacttccggccgggtcctgtatggcggcagagaaaaggatgtacttgccgtcgggcgtgaatgcggaagggatttctcctgccgagttggtggtcaggcgttgtgccgcaccgccatcggacggcattacgaatacgtcgaaatttccttgcctgtcgctggcaaacgctatctgtttgccgtccggcgaccatacgggagacgattcgtaagactcctgcgtggtgagctgtgtggccgtaccgccttttgcggaaactttgtagatgtctcccttgtaacagaaaacgatttccgtgccgtcgggtgaaatctgtatgtcgcgcatccagagaggagttgcggcataggtggtgagggtagtgaaacccagtgtgagataagcaaaaattttcttcatatcggataggattctattaatattcttggggggggattgaagccctttttcggtgagacagtctttcgcggctatttgatacctcttgctttgtagattatctctttggcattgttgatgtcctggagtttctcttcggcggcgcgtttgatgtcttctcccaatgtggctacccggtcggggtggtgcttcagtaccagtttgcgataggcggcacgcacctcctcatcggtggctgtaggaagaatttccagaactttgtaggcagcttccagggagttgccgcccaggttgagcatggattccacttctttttcggacagtcccatataggttgccacttctttcagcgcttctatctcttcgcggcagacgttgttgtcgctccgggctatgttggcaaggaatcccagcagttgcaggcgttcctcgtatgtgaggttggcggctatctgcctgccgcaatcacggatggtctgtctgaatgcgagaggattctgcatgtccattcgcttgcgttgctcgaagaggttgagcaatatccgttcgccttcgcctactgccgcaacgccgaagttggtccgtaggaaattgcggacatattccatttcactgtgcatgatgcgtccgtctgcccgtatgatgtacgaggccattaccagcatcgaaaaaagaaaactgttccgttgcccggcaaagacatcttcctcagtctgcccgttgccatagtctgtcgtataacttgcagtattgccaccgagctctatcagcgacccgagtgcatatcctgccaatgcgccgagcggtccgcctgccatgaagccgatgataccgccaatccattttcctgctcccataattttgttcttttatctgcaaaaatagcaattcttatccgaataagagaaaggggttaaaaagaaaaacggtcgtcactcgtcacttttagtctctatccctttgtgggagaacgatacagacgtggtgacacggacggcgacaggtgacgaccaaattcggtcgtcacgggaaaaggctctttttatccgtctttcagttcttaatcgtcctataatcagtgtgttattgtttaaaacaagatttcctgcatttggggagattttgttcatatcaggggctaaaaaaggttaaaccgtgactttgcctcccgaatgcgtaagataaatgtgatgttgccttgttgtttttccgctattgcatcttgtataatgttgcaacagcatgtagtattcctcgttttccagttgcggggtttttattgtggtacggctacatttattatgctgcttttcaacaaaaaagaataaggaaagtgctgtttttgtgtgggaaaaacgggttaggcttaggcaaaagaaaatggaagaagcggggattttttacgttgagctgttgttgtagatttattttaggaaagaaattaaaaagagggtgtgtcaaaactaacattcgcttgctatttgtttctttttaggcacggattacacggaaaacacagattttctttgttcttttttccgtgaaatccgcgaaatccgtgcctgaaagaaatcatcaaatgtattttgacacactctccttttaattaataagatgtgataatgagttatttcttagaatagtgatatttcatggagaatatgtaaatctctatcatatcattatgcacagaataaataagtctatgctctgtattaattcgtcgtgaccatttacctgccaattcatatttgagaggttcaggtttacctatgccagtgtaaggatgttccaatatatcggcgagtaatttcttaatgcgtttggttatgttggggtcattctttttccaatattcccaatgttcttgtgcaataggagtaaatatcagtttcatagttcatctaaatttacttctattcctttgcctgcctttaagtcttcttctcctttacgaatatcattcatggtctgttcagaagacatgatatattcggtctccttcaaagaattatattcttccaaagaaatcattactactcccgtaccattgccacgattgataaataccgtatcacaatcgtcaataaccgagtcgatataaccttttagattagctcttaaatccgtataattggttgttttcataaatcctcccttttatacacaaatgtatgtacttatttgcgtgcttgcaaatgtgattag

SEQ ID NO: 463 - DNA, 11999 bp, Bacteroides stercoris
  source 1..11999: mol_type = genomic DNA
tgtagccgaaatggcaggctgggattggacgttcatactgctgcttatagcttgcgccctgtcaattattctgatgtcctttacctataaggatgaaaaggcattgcttgcagaaagaaacaaaaaataatctttttaagataatatagaatgacattaaaccagtatttaccttaaaaattgaactatgtcgaagaatccaatcaaattaagtgcaaccttgttaggtatggccttagtagctttcacttcctgtgaagatcaagattttacagatgtgaataacgatgcaacacgtgttgaagtaaacacaatctctgccgaaatggcaaaagtgcgcgactacgtacccccttatgctgtaatggctcaccgcggttctactttctgggctccggaagaaacggaatcggcctggcgctgggcacgcgaaatgggtgcggactacctcgaatccgaccttcagtgtacgaaggacggtgttatccttgccaatcacgatgacaacctgaagcgtaccactaatattgaaaatgtatatagcgaactggttccggcaacccgcaaggcgttctatatgcgtcatggaatgagtgaggcggaagccgaaaaacttgtagaagccgataaagcaagtttccgtccttactatgcaatgtcttacatgtatgaggagttgcttgcactcgatgccggcagttggtttaacgaaacaagcattgagcaggctcgtgagtcgttttccaaacaacaccagtatatctcggctcttgaagaccaaatccgttacgctgaaggaaaaatgctgaagcgtgatgttaacggtgaacgcatatacactgttaccggtacttggaatccggataaaccccgcgactgtctgacatataaatttgaatatgtggatgatccgcaggatacaggcaaccgtccgggtgtctatattgaattcaaagagtcttggctgaacccttcggactttgaaaagcgcgtttacaataaacttgacgaacttggttggaacatcattaccaaaccttgcgacggcgaaccgttctataagaataataaagtaaatgtcggtaataccaacggtaaggtcattctccagacattctctctcgaaagccttcgccgtacggcagaagaattcaaaggcaaaattcctatgtgcttcctgttgtgggagggtaacggtgctaccgacctgaaacacgatactcctcagggttatgcttctttcattaatctcggtttggaatacaaggctcatatcatcggtccttgcatcgcaggcgctcccaacgactatccggaaatgaatgctccgtggcaggcctatcttatcaagaaatccggtatgctcaaccatccgtactcattcgattcttatgcgcaaatgggaaaatatttcggtcagtacaactggggaaatacagtacaatatgatgagctcctgcatggcatctatggcgacggtctgtttaccaaccgttctgaaatgagtttgaaatacttaattgacaacggtctgcgtaaggctccggctcctcagacagtgccggatgctgttgaaacacttaagagacttggttactaattaatttattaacactaatacagattatattatatgaaaaagtatattttaatgccggtattggctgcattgtcactgtcaggatcggttgcccaagcccaggactttgataataagccggttgttaatgtaagcaactccaaggagaatctgaactttacgattggcgcacgttttatgatggacggtgcatactatcattcggatttcactccggtgaaatcgggagctgctattaccgatgcgcgcatccgtacctctatgagctatgaagactggtacttctatgccgatttcgacttttccaaaggcaagttctcacagaagaatatcttcctgcaatactcgctggaaggtgtaaaaggtactcatcgctttaaagccggttattacaacaatccggcatccatggcaaacaataccagccgcggaagcctgcacttcatttcccgctcggcggcagccaacgctttctcaccgtcacgtgagctgggtttgagttatattttctacaacaaccacttcttcgccaatcagggtgtatttgccgagaacaagtacaacgaccagccgtcgggatatcagggcatgtcattcggcggccgttgggtatggcgtcccattaataacgaagacagaacattccacgtaggagcagctttccgttatgccaatatcgctacgggtgtggtggagaacaacgtattgaaaacagaactggatctcggttcttcattggaaacttacgtagatgctactcaggacttcctgtctgccaaactgccgtgggcgaagaatgtatttgatgtaggtgctgaattcttatacaagacagataacttctttacccgtggtgaatatatgtacaaacatgttaccaaagaacgtgacgaccaggcattgttcgaagctaatctgggttctatcgactcttggggttcactcgaagcatggcagaaaggtaatccgcttggtgagaactctttccacggagcttatatcgaagccggttacaaaatcttcggtgatccgtatcaatacagcaattccgatgctttgttgaaaggcttgaacggaagagcgcttgaagtggttgcccgttatagttataccggtctgaatgacctcgttgaaggcgagaaatatattcccggacgcgaccaatactatcccaacggtatattggcagactatccggctacatcattaagtgtcggtggcggtaacatgcactccgctactttgggtgtaaactactctttcaacaagtttgcccaagtaatgttgagctacacttacaatcgtcttgaccgtgacaagttccaatatgacaagaacttccacgtgctccaggcccgtctgatgttccaattctgattgtgtgcatttgtttataataatggttagtgagcctctgtaatgaggtaaaaacaagaaaggggatgcagtgaaaagcatcctcttttttgttgtacagaggtgtaggtgcagatatttcccggtatgggcggcataataaacgaaaaagttataactttgattgcatttttaattcagactaaaataagtagacttatgaaagtattctttgcgggcatttgcctgttcttctccactctcttctcatgtcagcagaaaggagaggatttcgaatccgtctcggcggacgagtttgccacattgatagcagattccgacattcagcgattggatgtacgtacggttgccgaatattcggaagagcatattccgggcagtatcaatatcaatgtgctggacgaacagtttgctgccattgcggattctacacttcaaaaagataaaccgatagctctttattgccgcagcggaaagcgtagtaagaaagccgccgctattttgagccggaaagggtataaggtttatgagctcgacaagggctttatcgggtggaaagaggccggaaaggaaacggagaaatagtttcttttaattctgattctgtcccccttgccgacacatagcactgaccgagctgtcgttttgcagaaaggagtttgtgtgagtgttggcaaatataaagaacagtgctggcaaatccttggccggtatgctgtgttttattcttcgggcacatgtaaaatgtcgttatgcttatagtaaaacttcgttttgcagtcgcgggctgcccggttgccaattgcgggcccgacagcccgcagctggaaactattcgtcccgcaattgcgggacgaaaaaaaacataaggcatactaaggttttgtatcgtatataagcgtattatctatgagagatacggagattacgataaaatggtatttataacccttctatcaggcgtttcaacacgactgtcgcagaaatctctcggttggcagcttccggtattacgatggattgcgggctttcaatcacgtcgtccgttacaatcatgttgcgtcgtaccggcaggcagtgcatgaaataggcattgttggttacggccatttggcggtcgctcacggtccagtcgcggtctttgctcagtatttgtccgtagttgtcgccggtataggcagcccagttcttggcatatacgaagtccgcaccttcaaaggctttcatctggtcgtattccacacgggcattgcccacgaatttcgggtcgagctcataaccttcagggtgggtaatgacaaagtcataatccgtggcgttcatccattccgcgaaggagttgggaacagcctgcggcaacggacggggatgcggagcccatgtcatgacgactttgggacgtgccgttttcttatattcctcaatagtaatgaggtctgcaaaactttgcagcggatggcgcgtggcggcttccatggagaataccggccggccggagtatttgataaactggttcagtattacttcgttgtaatcgtattcgcggtcttcgaagcgggcgaaggaacgcacaccgattacgtcgcagtagcaacccattacggggatagcttccagcaggtgttcaggcttgtcgccatccatgatgacgccgcgttcggtttccagcttccatgctccctggttgatgtccaatacaatgacattcatgcccaggttcagagcggctttttgggtgctgaggcgggtacgcagacttgagttgaagaatatcatcatcagtgtcttattacgtcccagctctacatatttgaaacggtcttttttgatttcgaatgcttcgtccagtgcagttttcagattgccgatatcctgcacacaagtaaagttcttcatatttttttagcgattagtgattagcgattaagcgttaatttactttcttatctgtccttctccttcaataatccacttgtacgtggtgatttcctctaaagccataggcccacgagcatgcaacttctgtgtgctgatgccgatttccgcacccagtccgaactgtgcgccgtctgtaaaggaagtcggggcgttgacgtagacgcaggcggcatctacttcgcggcagaaccagtcggcatgttctttgtcttcggttacgatacattcgctgtgtttggaaccatactgctgtatgtgtgctatggcgctgtctatgccttcaacgacttttacagccagtttgtagtccagaaattccgtaccgaaatcctcttccgtggcttctttcagcagttccgccggatagtggccttgcaaagaggtatatgcaagcgtatctgcgtagataatcacattgctttcctgcagcggtgcacagagggcgggcaggtctttcatgcggtcgccgtctacgagcaggcagtccaaagcattgcatacgctgacgcggcgcgtcttggcgttgttgacgatggcggctcctttctttacatctccgtaacggtcgaagaaggtgtggcatatgcctgcaccggtttctatcaccgggatggtggcattctgacggacaaagttaatgaggttgctgctgccgcgcgggataatcaaatcgacataaccgttggcatgcagtaatgctgcggtggcttcacggttggaaggaagcagctccacaacgtgcaggtctacttcaaactgtttcagaacgtcgtgtatcacgctgataatggcgcggttggaagcgtctgcatcacttccgccttttagtatgcaggcattgccgctctttaggcagagcgagaatacatcgaaactgacgttggggcgtgcttcgtagatgatgccgattactccgaaaggaacgcttacacgttttatcttcagtccgttgggcattactgcctgcttttgtacgcgccctaccggtgagggtagcttggctaccttgcggatatcgtctgcaattcccttcaggcggtctgccgtcagcttcaagcggtcgtacttcggattagagatgtccatgcggtccaggtctttccggttctcggcaaggataaagtctgtccttttctcggctgcatctgcaacggccagtaatatctggttaatcttttcgtcgttcagcgccaaaagcttgcgactggcatactgtacggcggaaaaggtcttgtttaaatccattttcagtgatttattaattgatacttctgcaaatgtagtgattataatcggtattaaccggacttattctatataaagatagtcatagtgcactacaggtttcttgccgtgctttcccatagcctcgcgagcctgctccgaactgcaattggctttgcctacgcctatcggatttccttcaaagtctatgatgcgcacaatgtcgtccttctcgaactcaccccgcacatcggtgatgcctatgggaagaatgctgactgccttgtcggatgcaagtacttttgtggcgcaatcgtcgatgtgcagttcgcctttggcaaacccttcactgtgggctatccatttctttacgctggatacaggctggggagcgggaatgaagcgggtgtaagttagttgagaatcgaaagcagagtattgaacatcggggaacagggcggggagttcctgatgcagcaggtctaccaggatattgtcgcgcttgccgttggcgatgataacggtaattccctcatcggccactttacgggcaatgttggttttggtgagcatgcctccgcgtccgaaactggatttggaagtctgtatgtaagaggataggtctttgccgtgctctatcttacggatgacttccgatgcagggtcggcaggcgagccgttgtagatgccgtcgatattgctgaggataatcaggacttgcgcatccatcatggaagctatcagtccggagagctcgtcattatcggtgaacatcagttcgctgacggaaatggtatcgttctcgttgacaatgggaattactccgttttccagcattacggtcatgcagtttttctggttgagatagtggcggcgggtagcgaagttctctttcatggtgagcacctgccccacagggatgccgtgttcacggaatagttcgtaataacggttgatgagtttggcttgccccacggcagagaacagttggcgctggtctacgctatccagctttttggcggggtgtatctcgcttcgtcccgaagcaacggctccggaagaaacgagaatgatttccacgcctgctttatgcagctccgccacttggtctacaagggcggacatgcgggttacgtccaatgtgccgtcacgacgtgtcaatacattactgcctattttgacagcaattctcgttagttgttgttccatatttgtgtgtttcccgatgcgggaagatttaatctccgtcttctttcttttcgtatgagcgaaccacttccatggctgcttcataattcgcttcattgacgagtactgctacatcgactgctgtctcgggcaggacaatgtttactatcatcccgtctttcaaggttgattcgatgccattgttttccagcaaactttttacaagttcggcttcccaaagcgatccgttgaatacttcgacgagcttgcttttatcttcttctttcatagcggtatgaatttagagttcttgtcctacaaatataacaagttttttcgatttaatgtttaatgccggacaatttatgcctatagctcgatgcgctgcaccattaccgcttcattcaggaagatagaggcggactcggtgaatttgtcttccgcttcggtggtatagtaactgcatttgccgttccgggtacattgggcgtctatttcgggatggcggtggagatagtctttcaaactgtcggccactaatttgccttgtgatactatcgtgatactctccggcatatatttccggattttgggtagcagtatcggatagtgcgtacaacccaagatggcggtgtctatctcccggtctttggcaaggagttcatttatgtatttgcggacgaagtaatccgttccgtcgccttgtgcttcattgttctctacaagtgacacccatagcggacaggcttctccgctgactttgatgtcggggaacagtttatgtatctccaacggataggattcggacttgatagttccgcctgtagcaagtactccgacgtggcggctgcgggttatattgccgatgcattccacggtagggcggataacgcctaatacacggcgtgccgggtcaaggtgcggcaggtcgtgtatctgtatgttgcgcagagctttggcggatgctgtattgcaggcaaggattacaaggtggcaacccatctcgaacagtttggtaactgcctgcaatgtaaactcgtagacgacttcaaaagaacgcgttccgtaaggggcacgggcattatcgcccaaatagatatagtcgtattccggtaaggcttcccgtattttacttaaaatagtaagcccgccgtatccagaatcgaatacaccgatagggccgggagtggaaggtagtttttgtttcatacaatctttctgacgctaagagtatagtgtgcagcaaagatagtgtaaattgtgaggatagggcacggattgtacgggattttacgaacagaagaattgattttgtaagtcattcagtataattcgtgcccttaggatatttatttaatcttttcgtagatgtagagttcgtgaatttctcccttatagccttcttcggtgaatggaccttgagacatacccaaaataatttgagtgccgcggttgttcaatacaacgaggtcatcgttcacagggtcaatggagagaccttctatctcaccggcacgacggaagtcgctcatttcccggaacagttcaacctttccggctttagcaccggctgcaatactacccttgcgtgtcactacttttccgcttttgtccagttttacgctgaaaggagtgtctcgtacaggttctactccttctttcagtccagtatagggtacttcggtgatgtcagcgatataaatattatcgggtatctgataaagtgattcaccgtcatctgatgtgaaaagcattttaccgtcggcaatgaagatgccctgacaccaataaggagtgggacgacattgcattttggtgtagtacttgccggtttcaaggctgtagcaatatacatagcggctgtctacccagtcggacatccataccatgttcttgtcacggtctactgccagaccggaaacttctacctgacctgattcaggacaccaaggtaggtctcttttccatttcaatgtttcagcatcgtataccgatactgcaatattgtagccgcggccatattcgaatttttctacaccgcagtagatttcaccattatagacgtcaatatcaccgaagtgattggctatttccgggtgctgaaacggctggtcattcttcatcaacatattaccttctttatcgtacttgtaaaggactttagtatccgatacgtaatagtagtccttgtctacggcaattccttggcgtccggctacaggaatcactttcttcaaacggtattcactgcctaaatgctgtgcatttacagacattgcacccataacgagtgccaataaaacaaataactttttcatgatagtatgatttttatatgtttaaaaatagaaaacgcccattagttgaatttgatcagagcctcgcttaccgttgttgcttatttcttttgctttgtcggtatagaaagagtgacaatagttagcttgtatcttcacatgattgcaaggattgtaagtgagccccaaaagaatacggtcataattgttcaggctgctgtcgtttaccttatcacgatagaaatcataacgtactaccggcaggaacttacctgcatgccaacctgccaaagcgtagaaaccatcttctttgattatgtcgcgtccgtctttgctacttcctatgtgcccgtattccgcacgcaggtcgagccctttggggtcgttgtaccaagcacctacgatgacacgattcataggttggtaattaaatgattcatcattgactgttcctttgtattctccccaattgtaggaagcttttatattgaagaattttgtaggacggaaagtcagagcagctacaatgtctttagacttattgttatcgtctttcataggcagatgtccgttggataatgacaggttataacttaaacggctgaatcctcttgcttcgtctgtaaacaagtcgccgaatgccattataccaaggtcacgtccataatctacaaagtcataacctatagcattgcggcaaaccatgcgatagcagatgtttgagaagtcgacagtttccaatgttgaaggggagagatcgtaattctcataaccgagtggcagatagtactggccgacacgtacttggaatgcttttgaaattttagcagtgacaaaagcatccattacttgtaagttcttctgtccatttccattggtagaacccgcaatgccgttaaaagcctcaatttgtaaacggaaagacacgtttttaactacatttccatccataatcaaacggagacgttttgcttggaatgatgatgaaccgtcacctactgagttgtagttccagccggtttgaagatagccggagagcttaggcagtttttccaaaactttttcccattttgtaggttcagactcttcggtagctgcggctactgattcagtcactgttgttgtcgttgcagtttccggaactgactctgcaaatgcgaaatttgataccagcatggtaccgctcaaaaagagcgcactgatgattttctgtttcatgtcgtaatagatttaatgtgaataatgtccctcttattgaggatttgatttgtttgttctgattttccaactttctgtatgaaattttatttcaggatttggaacgtcgttacatttcacgatgaccgctccctctttttcccaatattgcttgactgtgtatccgttcatcgggccatcttctttccctcgtatggtcgtgtcatccggatttacaacaattttcaatccgcacgattggttcagcatgtccatgtctccacggctattcccgccgactataagcggccgtgccttaataaatgtgggaattacattcgctttgccgtcatcttgtggaataggcataattatctcatctgtcaatcttccgttagctacaacggatttgactccgagaatttgtgtatcgggcaaccctaactcttcagcaaggaatttctgatagaggaattccggagatgcagtaagtatccatacttcaaaaccgtattctttcagattagcaatcagttgtttcatttcgggatagaattttccttggtatgaatcaaggtagcattcataacccatatccatgatttcagcaggagtcatacctgccaaaaaatgaacgcggtcttctacataggctttgcctacgttattaccgtcttttaccatacggttcagtatagcaattttgctttttgcttgcggatcgtttctatccttgtagtttttatcggcataacgatacaaggcttcatctgcaagataatagggaacctgtccgataactgttccgtcaccatcgaatacggctactttacggttattcattgtaagtgttgtattcaaaaaactttcaattctattgttgacctcatccgaccaacctgctattttacgataagtttgtgaaaaaacagatgtagggtaactggtcgctaacagaattataaatagaaattgatgaataagaaatgttttcttatctcttttacttggggtggaattcaattctttcatttttattttcttattttgtagtactgtattgttactttcttgcagctttttcttctttgtatgtgaatgatgtgaaaacaatggatagggcgcaggctattatcagcagtatgaacgtccaatcccagcctgccatttcggctacg

SEQ ID NO: 464 - DNA, 11753 bp, Bacteroides stercoris
  source 1..11753: mol_type = genomic DNA
ttggtacaaaataagaggagcagaggggatataaaaaaaggttaagccgttgatggcttaaccttttcgatgaattcctcgtttagaggtatgcggtttgtttgataccggtgttatttgatgccgagttgcgttttaactttggcagttacatctacactctgtgcacctacataaggtatcggagtacgggccaggtcgaagatatatactacaccctcagccttacctacagcctggatagcttcgtccagctttttatagataggagtcatggcatcctgctgtgccttttgcatagactgatatgcttcctgctggaactgttcttggcgttgtgccatgtcctgcagttctttctgacgtctttctgcaatgtttttcggaagtgagtcggcttgtgccaagaattcctgatatttcttattgaactcttcctgggtacgttgcatttctgtttggtactctttagacatagcatccaggtcggcttgtgcttttgtgtattccggcatggtgacaattacttcttgagagttcatgtgagcgaatttagtttgcgccatagctcccagggggagggcaaacataactacgagcagtgcgatttttttaagcataatatttactatttattttgaatgataattctttgtataggctgcaaatgtatgaaattaatttgaatatcctaattttgcaagcacttcattacttatgtcaatactcggagaggcaaagatgatgcttgatgcggatgcgcgatccactactaccgcataacctttctgtgtggagatttcctttacagcttcatagatttcatcttggatgggctgcatcagcgcttcacgctttttgaaaagttcgccttccggaccgaagtatttgcggcgcagttcggctgcggatttctctttggcaacaatctcttcttctttctttgtcttttgtgcatcggaaagagttttgacggatgcctggtagctgtcgtacaagctcttggcttctttacccagcttctcgacttcgttttgccactgtttggacacttggttcaattcattgctcgcactttgataggcagggatattctttaggatatattccatgtcgatcagggcgaatttctgtgcattggctgtaatgcctgcggcaaacagcagaaacatgattaataaactctttctcataatgttctggttttagttaaacaaattagaactcttgtcccaggatgaagtggaactggctgccgccgtattgcttggaaccgagtaccttgtcgaaaccgtaggcccagtcgatacccatcataccaatcataggcaggaagatgcggacaccgacaccggcagaacgtttcaaatcaaacgggttgaacttgtttacgtcgtgccaggcgttaccggcttcaacgaaagttaacgcataaatactggtacttgtttccagcatcagcggatatcttaattccaaaccgagacgtgcgtatgcataaccttcgtagccataaggagtaagagagctgttctcatatccacgcaaggcgacactttcggttgcatagctggaatatcctgtcataccgtcgccacctacgtcaaaggtttcaaacggagatttcttgtatttgttgtagtgccccagcagaccgaattctacgcgtcccatcagtaccggagtgcgttttacggcgatagggtccatcaacgggatgtatactttggatttgaatttccacttgtggtattctatccatttgtgcatcttgttcatatcatcctgattgctggtactgtacttgctgtaatctgtaccgtcgaacagggagtagggcggtgtcagttgtgccgacagcgagaattcggaaccctggcgcggatagataggattgtcgatagaactgcgcgacaaggtgaggtttatgctcaggttgttacacttaccgttggtaacggggaagtattgccagtcgctcagaatataacgctggtaggacaattctgccgtaaattggaagtagtcatccggccatttcaaacgcttaccgaacattacagccaatccccacatctggatggacttgtcggggtcgtaatagttttcataattgttatagttgccatagttgtacataccataaccgtacatgccgctatagtagctgttgtaataactgttcatgtacgcatcgttatagtaacggctgctgatatccgtctggcgggagtagaatgcagatacggagaacgcattcggacgtttgccgccgaaccacggatcgtagaacgatacgctgtatgactgatagtatttggcattggtctggccgctgatagtcagtgtctggccgtcaccctgcggcaggataccgcggtagttctcacccggatgcaacaggttggcaacggagaagttggtgaacttcagactcagtttaccgataataccagtctgtccccaaccggcagagaactctacctggtcgttcgctttggagacgaggtcataacctatatccaccgtaccgtcttccggtttgggctggatatccggttggatttgttcggggtcaaagtgtcccatttgctggatttcacgcatggaacgcatcaggtcttcacggctgaaaagctgtcccggacgggtacggagctcacggcggactacgttttcatacaaacggtcgttaccgttgatgctgactttattgatagtagcctgacggccttcgaagatacgcatttccaggtcgatggagtcacctacgatatttacttccacggggtcgagcgagtagaagaggtaaccgttgttgtagtagaggttgccgatagcgtcttcatctgtactggtacgctcttccagcagcttctgattgtagacgtcgcccttcttcatacggagcaggaaattcagttgttcggaaggatagagggtgttacctacccacgttacattgcgcaagtagtatttctgtccttcttcgatttccatgaaaatatccaccgtacggtcgtcataagacttgatgctgtcttttacaatcatggcatcacgataacccaattcgttgtatttgtctataatcagttgcttgtcggcttcaaaattttcttcaacaaactttttggtacggaaaaggttgagcagtttacctttttcatttgttttcttcatcacacgtttcagcttcttggttgtgatggcctgattaccggtgattgtaatctgatgtacctttaccttctcctttttgtcgatattgatatctaccaggacttggttctcgttgttgggatcatccttttgcgtgatgatgatgtcggcattcttgaaacccttatcgtcaaagtagcgcttaatcaatgtcttggcgcggtctatcaggttgggggtaatctggtttcctttaatcagacctacccgggcttccaaatcttcacgttccgacttctttacaccgtgatagcgaatatcggaaacgcgggggcgcatcgtcaggtggattgtaagccaaatccggtcaccctcgattttatccgcagtaacttgtacgtcggagaacaatccgtgacgccagtagcgtttgcaggcttgcgttatttcatcgccgggcacggtaattgtctggccttttgataatccggataaaccgatgattacatagtcttcataattcttggctccaactaccttaatatccgctatttcatatttcttgggtgttcccgaataaagaataaccggtttttcggtttcatcggtattgctggtgtcctgtgccgagctggtcagtacacagctaaagaggcagataaacgttacgagtatggaggaaatacgatagtacatttttttatttactatatttacgatttactatttacaatttgtgtttgtccggtcagcggatttgttcgctggtttttccgaacctgcgttcacgcttctgatagtcgtggatggctttgtgaagttccgcttcacggaagtcaggccagtaggtgtcgcagaaataaagttccgagtaagcacattgccagagcaggtagttgctcaagcggatttctccgcccgtacgtatcaataaatccggatcgggcatgaagtcggtggcaagatattgggacaacagggtgctgtcaatctgttcgggagtcagttcgcctttttgcactaaggctgcaaggcggcgggcggcttccgttatttcccagcgggacgagtagctgattgccagtaccagagacatcccagtattatttgcggtatgtgctatacaggtttccaaacgttcccgcacattgtcgggcagcttggtcagatctccgataacccggaaactgatgttgtttttcatgaatgtttcctcttcgatagagtcgaacagaagcgccatcaatgcagcgacttcattagaggggcgattccagttttcggtggagaacgtatataaagtcagatatttgatgcctaatttagacgcttcttctgcaatgacatgcactgtctcggcgccggcctggtgtccatagctgcgctcttgtccgcgcaactttgcccaacgtccgttgccgtccatgataattgccacgtgttgtggaatccggcttaaatcaagttcttctttatttagcatctttttatacttacatctcttgtcttggttactattctcgttttatacttttatatatataaaggaaacagaaataatgaatttattgcaccctgactggcatcagcttgttaagatgtccgcgccaaacggcagcatctgttccgtttccgccgaagataacccatatataagggctgtctgcaacaatggaatagggagcagttatatctgtcatatctttatgtaacaagaattttctttgaggctcacgccaggaaataccgtcaacggaagaataaatggcatcaagcttgttttcatctttgctgccgaagatataaaagttctcaccatagtacattacggcaggattggcaaatttcggacaatacacatcataggaactggtgtttgccaatgaataccagtctttgccgttggaagaaacccagggaatggtttgctgaacgtctttttccgtacgacccactaccattgcctgtgactgattgttgctgtcaaaattggtggagtagatatgtgatgtaggaaagtcagactctgccttacccatatttccttctatcttgttgccttgattgtcaactgtgtaaacttcaccgtttgaggtaacgacagtcagcacatcggtaaaaccggcaatcagtgtccggatattgctgttcccttcccaattggctggtgtccaatttattccgtcatcggaagaatgtgccgtaccgtcttctgtcacgatgtaaagtctttgtttctcatcttctccgtctttgtatttcaggcagacgagggattccagttttgcattgtcgggaagtttagctccggatactgcatcccagccgtatgtttcttctgtgtccagccaatatgcacctgctcttgtctgtgttttctgtgccgcagattgtgtaaatacccacagctcgttgttgaataggatggccttttgttcacctgaaagtgtcggtgcacttcccattttatcccacactaaggagtccggatcctgcttgtgtactctgatttcaagggaatattcatttacggtaaagccgtccggggcatgtattttgaatttcatcccgttttcggtatttatggctttcgtaagatttaccgagtcggctctgttgaatatcgtatcaccgctgatactattcatttcatctcttgaagtaatccagccgcttacggtgaacgtgtcaattaatatgcggtcgataatcgtatctgctcctataggcaatgaatcctggttgtagatttttcttcttaactggtctatcgtgaatttataatgtttgccgtataccgtatcaatgccaaaagcatgtaccgttgcatcggagcttagttctaccgtgtcgtcagagtccaggcacgagcttattgcgattgatacaaaaagaaaacttgcgattatagctaaaaactttattctcatttgaaagatagtgtttatttacaagttgcaaaaataggaacatttttttctataaacagctttatcggcaagttttatataaaattatagataatatggctgtttttctcgataaaaatgcccttgaataaggctgttagcctaatcttgtggcgctgtaatgccggaaattcctgccgaaataaacttcgttggtacagggcgctttattgccaatttcaggtgccttgataccggataatagcgttaaaggactttcttcgacaaaggcttcgtcccataattccgcatcgataaaggactgtaacaggatgtttccgccttcgactaacagagattgtagtccctgcatgtacaggtgttccatgatttgcggcagtatattccgttggaagtcaatggggatgtattcaacgttgggctgtggctggcacggtttctcggtgaacacaagtgtgcggacatttccatcgaatacatgcagcttgggagacagccgcaactgtctgtctgttacgattcgtacaggcgaccggccttgccagttccgtacagtcaggctggggttgtccagctctgccgtacgtgtacctaccatgatggcattgtgctctgcccgtttcttatgcacaagcatggatgtcaggggggtggatagaatgaccggttgcccgtcctcacggttcttatcgatgtatttgtcggcagactccgcccatttcagggtaatgtaggggcgacgaagggtatgaaacgtgataaaacgccggattagatttctgcattcatcttccagcaccccggtgatgacttcccgccctgcatctttcagcttccggattccccgtcctgctactttggcaaacgggtcctggcagccgattacgatgcgcggaatctttttctctatgataaggtcggcgcagggtggtgtttttccgtagtgggcacaaggctccaggctgacgtagattgtagaacgcttcagcaacgaggggtcttttacggagcggattgcattgacttcggcgtgcgcttcgccgcaacgcacatggtatccctcaccgataatttttccgtcgcatacgattactgcgcccaccatcgggttgggagctgcattgcataacccgttttgggctagctgaatgcagcggcgcatgtatttttcttcttccatactttgtattactcttaaacttccactatttttgcagcccgaaatgccgaatgttatgactgtttctgtttctcatatccgccatgctttgcaggagagttactctgcgcaagaagctgccaatctgtcccgcattgtctgttgcgaaatgctggggcagactgcggtcgattattacctgggcaaagatatgattttatccccaaaagagatgcaggatttagacaccattcttgcccgcttgcgtaatttcgagccgatacagtatgtgcagggcaccgcccgttttctggaacgctcctactatgtggcccccggcgtgctgattccccgtccggaaacggaggagctggtggaggtgatgctgaaggaagttccgtccggagcccgtattcttgacattgggacggggagcggctgcattgccatttctctctccaagatgctgccggatgccaaagtgacggcatgggacatttcggacactgccctccgcatagcccgccgcaataatgaggcattgcaggcatccgtgtgttttgtacagcgggatgtgctggcgtatgttcccggcagcggggaacggtatgatgtgattgtcagcaatccgccatacgtcactgaatcggaaaagcaggaaatggagcgcaatgtcttggactgggaacctttttcggcattgtttgttccggataatgatccgctgcttttttaccggcgcattgcagagctgggcaagggtatgctggcgtccggcggcagactttattttgagataaaccgtgcgttcggggaagctacggcaacgatgcttcgcgcacaggggtacaccaatctacgggtgttgaaagatatttccggaaatgaccgaatagtaatcgcagaacgatgatagaaattacagaaacagatgctttaagccgcgtggctgcttattgctccactgcggagcattgccgtgcggaagttacggagaagttgcagcgttggggtattccctatgatgccatagaccgcataattaaccgtttggaacaggagaaatatattgatgaggaacgcttttgccgtgccttcattcatgataagtaccgctttgccaagtgggggaagataaagatagggcaggcgcttcaactgaagaaaattccccaaagtgtattttaccgttacttgaacgaaatcgacgaggatgaatatcttgccgtgctggataatttgctggcggtaaagcgcaagagcgtgcatgcggagaatgagtacgaactgaacaataaactggtgcgttttgctttgagccgggggttcgaaatgaaagatatccgccactgtattacgctttctgatgaaaatgacgaattggaataaaatttatccgtattcttttttattctcgtcagctttctgtatttttgcggcatatttatcataatagttagtttggctatgaaaactttagaaagattgtttgcagagaagttgctgaagattaaggcgattaaactacaacccgctaacccgtttacctgggcgtcaggatggaaatccccgttttactgtgataaccgtaagactctttcatatccttctctccgtaatttcgtgaaagtggaaattacacgtctgattctggaacgtttcggtcaggttgatgccattgccggtgttgctacgggagctattccccagggtgcattggtggcggatgcgttgaacctgccgtttgtatatgtacgctctaccccgaaagaccacggtttggagaacctgatagaaggtgagcttcgtccgggtatgaaagtggtggtggtagaagatttgatttctaccggcggaagcagtctgaaagctgttgaagccatccgtcgcgacggatgcgaagtaatcggtatggttgccgcttacacatatggattccccattgcagaaaaagcattcaaggatgcaaaagttcctttggtgacattgaccaattacgaagcagtgatggaagttgcccttcgcaccggttacattgaagaggaagatgtgcttacgctgaacgaatggcgtaaagaccccgcgcattgggaagccggaaaataagacttattttacataatgatagattatgacaaaagagccattcggatagttgctgtccggatagttctttttgtcttttaaagaccattgtattatgactaaatttgaaagtgcggtaaaggtgatacctgcttcgcaaaaagctgtttatgagaagctttcagaccttagcaatttggagaaagtgaaagaccgcctgccgcaggacaaagtgaagaatttgagtttcgatgcggaaacattgtcgatagaagtaccgccggttgggaaaatagtattacagattgtagagaaagagccttgcaagtgcatcaagtttgcaacaacaacctcgcctctgccctttaacctgtggatacagatagtgcccgttacggagacggaatgtaaaatgaagcttaccatcggaatggagttgaatccgtttatgaaaaccatggtgcagaaacctttgcaggaaggattggagaaaatggcggagactttgtcgctgattaattattaattactaaatcttatggctcagaaactttgggaaaagtccgttcaggtaaataaggatatagagcgttttacggtgggacgtgaccgtgagatggatctttatctggcaaagcatgatgtgttgggttccatggcacatatcacgatgctggaaagtatcggtttgctgacaaaagaagaattgtccctgctgcttgcggagttgaagaatatctacgcaactgctgagagcggggagtttgtgatagaagagggggtagaggatgttcactcccaggtggaattgatgctgacccgtaaattgggtgatgtaggaaagaaaattcatagcggacgttcccgtaatgaccaggtgctgctcgacttaaagctctttacccgtgcggagataagggacatagccgaggctgtagaacagcttttccatgtgctcgtcatgcagagcgaacgttataaagatgtattgatgccgggttatacccacttgcagatagcgatgccgtcgtcgttcggactgtggtttggcgcttatgccgagagtctggtggatgatatgctgtttttgcaagccgcctttaaaatgtgcaaccgcaatccgttgggttctgctgccggatatggctcgtctttccctttgaaccgtacaatgactacccggctgttgggcttcgattcattgaattataatgtggtgtatgcccagatgggacgcggtaagatggagcgtaacgtggcttttgcgctggcaagcattgcaggcaccgtttccaagcttgcgttcgatgcctgtatgttcaacagccagaacttcggatttgtgaaactgcccgatgactgtactaccggttcgagcataatgccgcataagaagaatccggatgtgtttgagctgacacgtgctaaatgcaacaaactgcaatcattgccccagcagataatgatgatagccaataacctgccttccgggtatttccgcgatttgcagattattaaggaagtattcctgcctgctttccgggagttgaaggattgtttgcagatgacgacctatattatgaatgaaatcaaagtgaacgaacatattctggatgacgataagtacctgcttattttcagcgtggaagaggtaaaccgtctggtgcgcgaaggcatgccgttccgagatgcttataagaaggtcggtctggacattgaggctggcaatttctctcatgacaagacagtgcatcatacgcacgaaggcagtatcggcaacctctgcaatgatgaaatatccggtttgatgcagaaagttgtggacggctttaattttgaggtaatggaacaggccgaaaaaacgttgctcggccggtaatcatagtgaattaactgcttgtggtgtacgatgttggctttctctgtttaggatataaacttattaatgacagtctggttaatatcgtacatccctatttatttaacttttttccggtaaaaagtttggctgtaacgtagaaactgtttatctttgcacccgttctccagaaacctgcggaaatagctcagttggtagagcataaccttgccaaggttagggtcgcgagttcgagtctcgttttccgctctccttttttgaggatgctcgaatggtggaatggtagacacgaaggacttaaaatcctttggccagtaatggctgtgcgggttcaagtcccgcttcgagtactcatctaaggctttgtaaatcattgatttatgaagctttttttatgctttttatctaaatcggaaatcttattttttttcggaccgctctgtttttggggtcaacgtaaaaacgggtcaacgtaacaatctgagggattttatatttaagcatataatttcagcaaaaatagagtcgcattttagga

SEQ ID NO: 465 - DNA, 11160 bp, Bacteroides stercoris
  source 1..11160: mol_type = genomic DNA
ttctgcgaaaactttgcagatttcatacatcggtatgcagactcaggaagtggctatcaaaccaaacctaaaagtaatattaaagtctgatacggagctgcttgatgaagtaaccgtagtagcttatggcactaaacgtaagcaggatctggtaggctccatcagtagtgtgaaaaatgaaattatcagcaattcgcaggctgcatccgtttcaaacgcactcgaaggagctgtagccggcttacaggtagtaagttcttccggacagccgggacaggatgccgatatcgtcctgcgcggtataggttctatttcagctagcaataatgcgttgattgtggtagatggcgtgcctttcaacggtaagttgtcggatatcaaccctacagatattgcttcggtgaacgtatcgaaagatgctgtttccaactccttgtatggttctcgtgcagccggaggtgtagttatgattacgaccaagaccggacgtaaggacaaagtatccattaactttgacggtagttggggggtggcacagcgtgcgtataaggattatgacatggctaccgatcccggagagttctatcgcctgacttggtacggtattcgtaatacctattgggcagccggaaactccattgaagattctaatttggcagccagtcaggatttgctgggcgaactgggtaattacaatgcttacattattccgcaaggagaatatctggtgacacctgatggtaaacttaaccccaatgcgcgtttgcgttatgatgacacttttgctgatgccttgttcgacaacgctttccgtcaggaatataatgtgtctgcatcaggtggtaacgaccgtacggatttctatgtatctatgggatatttggacaatgactcttatgtattaggttcttcttatgaacgttttacagctcgcgccaatgttaactcccaactgaagtcttggttgaaagtaggtaccaatgtagggtattccaaagctactcaaaacggtgtacaggaaaatgccggaactgcttctaatcctttcgctgtggcacgctcctgggctcctatcttcccggttcatgcctatgacgcagaaggtaacatgaaatattatgaagacggacgtcccatgtatgatgccggaaacggtgaaacagacggtacatccaaacgccctactgcaactaatcaaaatgtgatagccaacatgagagaggacattcgtgaaagcgtgtataataacctgacttcacgttcatatatagaaatctcattcttgaagaatttcaagtttacggcaaattacagttatgattttacgaatgacagcgaaacactctattacacgccaactatcggtgacggacagtcgttcggtggtcgaggtacacaggcaagtatcaacacaacaactaccaacttcaaccaaattttggcctacagcaatgtattcggcgattaccaccacttatcggctaaggtcggtcatgaatactataagtatgaatacgactattttgacggacagaaaacaaacttttttaatccgagcaatccggaactgaacaatggtggacagatgcaatacatcaatagctacaaggtgaaccacaacatcgagggctatttcggtatggcagactatgattacaataacaaatattatatctcagcagctttccgccgcgacggtacttcccgcttcctggaccgttggggtaatttctggtcggtaggggccgcttggcgtatttccaatgaagcattcatggacggaacggacgcttggttaaatgacctgaaaatacgtgcttcatatggtacccagggtaatgaaaatatactttcggatgaaggttacgcctatgtatacacaccttaccaagaccaatatacggttacttggaatggtgctgaattaggctattcaccggaattttacggtaatccggatttgacatgggaaaagcagaaaacttttgacgtgggtgtagacttccgcttgttcgaccgggtatatggttcatttgaatacttctatcgccgtacagatgatatgcttttcaagcgtcccgtagctttctctacagccggacgtccatataactgggaaaacctgggtgcgatgaaaaacaccggtatagagttcgatgtaaatgtagatattttcaatcagcctgacttgaagtggacggtatcgcttgtgggttcccactacaaaaaccgcatcttgacgctgcccgaagaaaatcgcaaagatggtattaccagtggtccattcaacctgcgtgaaggcaagagccgctttgaatactatacttatatgtatgccggtatggatgaaaaaggaaatgccatgtggtacatggacgaaacaaatgataaaggagaagtaataggccgcactaccactactacttacgccgaggcaacccgctatttcatcggcaaatctgcattgcctgattttaatggcggtttcagtactactttctcttacaaaggtattgatctttctatagcaacggctttccagattggaggctatgcttatgattattcctatttggatggtatgagctcctcattctatgtaggtcataacaaggatatgtggaagacgttcaatccggagacaggtacaggctcactccctatctggaatgcggacaatgcttctaactctttcactcagcagtcagacctcaatctgataaaggccagctacttcagtatccgtaatattactttgggttacacattaccaaaaaacctgatgcagaaattcggtattgaaaagttgcgcatttatgctacagcagacaatcttgccttgtggtccaaacgtcagggatttgacccccgtgtggcaatggcaggcgctgacgatgaatatggaggctattctccgatgcgtgtgatttcaggaggtatcaaccttacattctaactaaaaaagttttgtatatgaagataataaaatatatgatgcaggtactcgttgtcggcagcctgcttacatcttgtgttgaagatgccgatgttaccgcttatttgaccgaagaccaactgagcaatgtggctcaggacgaccctgataaaactttttcggccgctgtggcaggtatgtattctgatatgcaaaagtattatgataccgatatgctacataattatttcggtcaaaagagctttgattacctgacatcgttgatgggtaacgacatgattatgaccggacgtttcggtatgagtctctatcattatttgttggattattggcaacagaactatactccgaccaacaatcgctggaaagaatactatcgtgtcatagccaatgccaataatattctcaaactgattgaccccagcagtgaagatcctgccaatttgaaatatcgtgccatcgctctcggcttccgtggctatgcctacttgcaactaacctatctgtaccagcactcttattataccggtgcagacggaacgaaatggggacgtggagagaaatatgacttctcgcaatctccgtgcgtgccacttatcacagaagaaacggaaggcgaccagccgcgtgctactgtagcccagatatatgagcaaatcatgagcgaccttactactgcctttggcttcttcaaacagttggatatgatacacacctcctcacctacggatatggacggttgcgtagtagctatgcacttggcccgtgcaaatatggttatccatgaatgggataaagcgatagaatatgcgcaagtagtgatagacaacatccctatgttaacgaatgaaaatcagatactgcaagggttcagtaacatcagcctgccggatgtggtattcggctgcgacattactgcagataatagtacgatttatgcatcttacttctcgcagatggatgcttacagtgaaggctatgctggtatcggtgtatggcgtgccgcctttaagccgtttgtagaccgcatcgcggataatgatattcgtctgcaatggttctgctgcgaccgttctacaggtatggatactgaagataaagacggtaagcctatccgtgtgacattgttgcgtgatactgaaacgccagcttccgtagaatatcaggctgtgaaattcatcggcacaggtcgtgaaaatatccaggcaggtacattcagcggttgggaattgggagactatatctatatgcgttcggaagaagcttatctgataaagatagaagctttggcacacaagaattctccggatgctgtaaccgaactggaaaacttcatgaagacccgtcaacccgattatgattacacctttacgaacaaagccgacttgatagaggaaatcatttatcaaaaacgtgtagagttctggggagaaggcttggaatatattgacaatcgtcgtttgaatattcctgtagaccgtacggatgaaacctggggtgcagaaaacaacaatcacttctctgctgccaagttccgttataatcaggaagaacgtccattcctttatcagttgcccatctcggaaatagagaataattctcagatttctccgagtgaccaaaattgatagaggtaaagaatatgttataaataaaagtcggtaaaggcaaactgcttttaccgatttttctattattgcatcactagaaaaggtctgtcaacaatagtattcctttttaactgatccgtttccttaaccaaatatcgaagaacttgtcatacacgctatacactcccaattcattagttacaaaatctttatctaaaagtcctcttatggctccttgcacagaactcgctgttagcttataagtttttaaaaatttagaggaagtgatttcctgagcctttccttccttacaaatagcaatgaggacttctttttgtttaggtgggagttgaaacagaagtgaagaataggtaaaattcagttgtgacaaaatattttcaatggcaaaattcactttatcaacagtacactcctcaccttcagcagtcattgcataaagcgagtttgccataaactgaatgtaccaggttattccttcaaaacgtttataaacttcttgaattgtttctactgcaatttttttcttattctccgcaaagtgtctttttatgaattccgtataaatatctgcattaataggagacagttccataatggccgtactttggtaaaacggacgtgacggactagtaaatatctctcccatcatatgacgttgcgaaccgtcatagataaattttgcattggaacaatgttggatatgtgtccgtaatatggcttcaacatccccttccggatatttggctatgacttgaaactcatcaatggaaatcaggcaaggcttatccgcttcttccaaataacggaatatttcatcaagcgttatagcgggagtctttatatcacccatttccaaattccaactgggattaccactgaaatcaaaagagatactggtgcgaagagaggataaacatttgagaaacagctcccatgcttttcttccacgcggcttcaaaccattcagaatacctttaccaagttcaaatacaaactcctgaaaattctttgttgcatatatatcgattaaaaatgtgtgatatactttccttatttgttgctgatgaaaacaatgctctatcagcccggtttttcctaaacggcgaggggatatcaaagctacattattcccgttggttatataacgtgtcaatgtagttgtttcggttatacggtcgcaaaagtactttgctgaaatatagccactggttatgaaagggtttatttttgtcataggttacatgttttacacaaaaaaaattataatcttattataattgcttgtttatgatgtttttttgtaataggattatgttttattttgacataaatctttgtttgcgactttcatcatagtgtatttctttatggtcaaccacgactactcacattactttttattttacaaaaatagttcaacaaaaaactaaagtatatttcgatagtttcaatatagactacatcgttatgtgtatattattgataatcattgttttattgtaaaatatggtaacatatgagtaacttgatagttttgtaaatacatggtagagcatattctattgaggtttttaattaaatgcaatgattttgtatctacttataaaatgtttatttatagaagtttacgcattgatacagttctgcgaaaactttgcagatttcattcgttggcatgcaaacgcaggatgtggctatcagaccaaatgtaagagtgatactcaaatcagatgccgaacaattggatgaagtagtagtaactgccatgggtatcaaacgtgatcgcaaagcattaggctatgcggcacaggatttgaattcagaacaactgaataaagcaggaacaacctcgcttgccagcgctatacaaggtaagctgacgggtgtagatattcgtcagtcatcgggtgcaccgggtgcttcttctcagattgtaattcgtggtgctcgctcgtttgatggcaacaaccagccgttatatgtaattgatggtatgcctgtgaatacaactgcggattttgataccggtaaatctgtaacgggtgctaactacgccgatcgtagcatagacattaatcctgaagatatagagtctgtgaatatactgaaaggtcaggcagcatccgcattgtatggtatccgtgcatccaacggtgtgattgtcattacgaccaaacgcggttccaaaaacaatatgaacaaaccaagcgtaacgatttcaacgaacctgagtgcacaacgggtttcacgcaaattcgaacgtcaaaatatatattcgcagggcaacagcattgcagcaggatatgatccgtcttcttccatgacttggggaccaaaaatcagcgaattggcaaatgaccccaaatatggtggaaacatgaataatcaatacactgcggcagatggtatgcgcgaaggacaatattacaatcccaaacgcgcacaagccggtttggatggttggactacgccacagatttatgataatgtgggcgattttttaggcacaggattcactgaaaacacaaacgtgaatctatcacaaagcatcaacggaataaactattcgttcggcgtgaacaattcgcaccagaatggcatcattccttcaacaggcatggaccgttggggagcgcgcggattggtagattggaaaatcaatccacagtggaacacaggattctccatgaactattcatctactaaaattacatctgcaccgggagccaacgatggtatcatgaatgtggtttactctgctccggccgaatatgatttgaagggtattcccaatcatgaaccgggcaatccgacaaaccagatattgttccgttccacctcatttaccaacccttattggtgggcggaacataatgaatatctccagcataccaaccgtgcttttggcaatacctatttggagtaccaaccggatttgggcttgggagagaacttctcactcaagattagggaacaggccggtcttgacatttggacttctgactatgccactgtacgggaaatgggcagtacgtcatcgctgaaaggtggagacatagagaattacggttctcagcataatgtattcaataatctgttcaccgttaattttgacggtaaattcggaaaaagcgacgaatggaggctgaacgtaatattaggaaacgagttcaatcatgagagtatccgtaactgggattattacggcagcaacttcaactttcctggttttaccaacattggaaatgctacttcactaacatctagtgagtataagcgacaagaacgtacagtaggctttttcggaagtctttcaatgtcatggcaagatcaggtgtatctgaccgtaaccggacgtaacgactacgtatcaaccatgccgcgcggcagtcgcagtttcttttatccttcagtatcattaggctgggagttcaccaaattacctttcttacagaacaataaaatattaaactatggtaaactccgtgcttcgttcgcacaagtaggtcaggccggtaactattatgccaattattattatactcccacctacgggggcggtatgtactcttactatccggttacctatcctctacccagcggagtatctactttcacaccctattaccgcgtgtatgatgaagaattgaaaccgcaaaatacaaccaattatgaagtaggtgccgatttacatttctttggcagccgtttgaaagtggaatacacatacagtttgcagaatgtagaagatcagatattttatgtacccgtagatggagcgaccggctatcaggaaatgttgaccaatgccggaaaaatgcgcacgcatgctcacgaactttctattaatgctgctattctgcaagccaaagatttcgacctgaatttgggtatcaactttaccaaagtaaacaacaaggttatagaactggctccgggtgtggaatccattatgctgggcggatttgtagaaccacaaattcgtgcacaggcaggatgtacttatccgaacatatatggtttgggcttcaaacgcgatgaagcaggcaatttgctgttactgaacggtctgcctcaatcctcgggcaatagccaagacttgggcaactgctctccggacttcactactggttttacgctgggtggccgttataaacgtctttcactctctaccacatggagctggcaacaaggtggaaagatgtatcacggaacaaacatgactctgaattattttggtgctaccaaagagtcacttccttatcacgaaggaagtatggttgctgaaggtatagatgaagcaacaggacagcccaatacagttgaagtaaataaagccgattactatcaggcttattacaatatcaccgaatctggcgtgtatgacacgagctttatcaagttgcgcgacctaactttgacttatcaactgcccaaactcggtatcttcgacatttcgatttacggctttgcccgtaatgtgcttgtttgggccaatttgcccaacttcgatccggagtcttcgcaaggcaataataatatgagcggatacttcgaacggttctcagttcccaacacatctagcttcggcggtggtcttactattaatttctaaacatataacataaagattttgattatgaaaaaatacatattcatgactttgacggtagctcttctcggactggcagcatgtacggaagatgcatttgaccgcatcaacaaggactatgaacatccttcaccggaagccgtcccggcagcactccaactgacagatgccattatgtccacaggcttcagtaccgtatcgggtgactttgctttttacctttcttcgctcaatgagcaagagataggtatgggtaacaaccaattaatgtttgccgaaatgcgcaactcaagcgaatgggctgcttctactacctttaacaatgtatggaactctatctatggcaatttacagaatatacgccaaatgcagagtaaaatagagaatgaagtaccgggtaatgtcggacagtttgatatactgggtatggcacaagtattggaagctgtaaacttcggtgtcctgaccgatatgttcggtgatattccttatagcgaagctgtgcaagggcaaggtaatttgcaacctaaattagatgcacagaaagatgtttatactggtattttggctacactcgacaaggctattggtaacttggaaaaaggcaaaagtttgacaagtgctggtaatcaggacatagcctacaaaggggttgcatctaaatggctcgcagctgctcacgctctgaaagcacgctatctgttgcataaactggcggtagaacctaacgtactttcagaagtagcaacagccgtacaaaaagctatagacaacggattcgaaggatttacggttacaggatttaatggttctacatgtgacaatccatggagtgcctatgttttcagccgccagtacacagcaccttcaaagacagtagcggacttgatggaagccacagatgatcctcgcttggattattatctgaatgctttgggagagtcttatactccgggagatgaaactattgccaagacagtagatgatgccagagtaatgaaatatcagccggcatggtatttgttcggttcacagcctattcatatcatgagtaaagccgaactctatttcattcaggcagaagttcaactgcgttcaaacattgatgccacctcggcgtatcaaaaagcagtagaagcttctgttacggaaattctgacttggtttggagatgaatccactgtaccgactgctgcaacaatagcaaaaaactatgccatgtctttgggcgcaccgacactccaaaaactttttgaacagaaatatgtggcgcaagcattggacgagcaagtggaaacttacaacgatctgcgtcgcttgaaagcaatgggagaagagtatgtaatactgactaacccgagaaacacccaaagcggtattaaccgctatccggaacgcttgccctatggcaacagcgcggtcatcggcaatccggatgtgaaagaagcctacggcgacggttcttatatctattctgagaagacgtggataaacggaggtaaataaattccagtaaataaatccctttgttttaggttgttttcacaaattcaatctaaaatggagggatttttccgtattaaaactcatctccaaacattgttctttctttaggaataaagcatttataaatatttacaaaagaacaatagttaatacaagatatactatagtattccataacaatgtattcgtttaagttcaatatataattaattaaattatatcaacaaaaagataaagaaaaaaacagaaagtaaattttcaatatgataataaaactgcattattgtcataaatgtctgaatattaatgatatgtattaacttcaagtagataatgggtatacctccaaatcccgtacctctcttatattagcttttaaagaagactatactaattataatcagttctatcaaagacataatatattaataatcagatatttgatttttatgcag

SEQ ID NO: 466 - DNA, 10639 bp, Bacteroides stercoris
  source 1..10639: mol_type = genomic DNA
aatttcatacatcggtatgcagactcaggaagtggctatcaaaccgaacttaaaagtggtattgaaacctgatactgaggtgcttgatgaagttgtagtaaccggatatggtaccttcaaaaagtcctcatttacaggttctgcatcaaatgtgactaccgaaaagttacaggatttaccttctatcagcgtgcaagatcgtttggctggttctgttgccggtgttcaaatcacttctacttccggtcagcccggctccgttgcctccgtgcgtattcgcggtatggggtctatcaatgctagcaatgaaccattatatgtcattgacggagtgcccatgctgaacgggaacgtcagcgaattcacttacgcagattccggtaacagtctaatggctacactgaatagcaatgacatagagtccatgacggtgatcaaagatgctgcggctgcctcattgtatggttcgcgtgccgctaatggtgttattgtcataacaaccaaaaaaggctctgctggcaaaaccaagataggggtaagagcagactggggtatgtctaatatggcaatcgattatcgaccgattctcgatggtaagcaaagacgtgaaatcctgcacttgggatttgagaattatgccaaatatacccttggttatgatgcagaacaagcagcagctttggccaataaaaacatcgatgaatatgcagcagaaccctggtcaggatatacagactggaaagatgtcttattccgtaacggtagccaccagaattatgaagtaaatgcacaaggcggtaatgaaaaaacgaggttttatacttcttttgcttatacaaagcaagaaggtattacaaatgtatcaggctatgagcgtttcaccggtcgcgccaatgttacacaccaaaccgacaaagtgttattggaagccaacgccatgtataccaattcaacccaaaacgtaaataatgaagggaccagctttgcaagccctatcatgtgctatgcaatgactgcctctccctctacatatccatataatgaagacggttcattcagcagtaacttccctgcactgaatggtgccaaccctatacaaactgaaacatataattacaacagggctaccataaaccgcttcctcggttcaatggccgctacctggactatttgggataatctgaaattgaaagaagccatcagctatgacttcaaccaaaacaatgaacgtatatggtgggatccccgcagcaacgacggtcgttcatcaaacggtgtttatcagcgcgttatgggcaacagagggcagttaaatacacaaacacaattatcttacaacaaatccttcggattacacaatctggatgctttggtaggctttgaaaccgaagattataaatatgattatttatatgccaacggaaaccaatacccttcttacctgccggaaatagaaaatgcaggcgatagccgtgcttcaagccatgtagaacgatacagaatgacttctttcctgggacgtatcaattatgactacaataacaagtattattttagtgcaagttatcgccgggatggcagttcccgcttgtcaagagaaagccgttggggagatttctggtctatatccggttcttggagactgagtgaagaagctttcatgcaggatatcaagcatgtgctgaccgatgccaaattacgtgtatcttacggtgtgaacggtacacaacccacagatttatacggttatttgggcgtatatgaatttggttataactatgcaggaaatggcggttcggctgaagctcgttttgacaatcccaatatgaaatgggaaaagaattacgcaaccaacgtaggtttggacgttacgctgtggaacagattgtcgattactgcagaatggtataaccgagacactaaggatttgttgatgagcaagaatatttcagccgtgccgggtgtaatcaatagtagcggtggagccactatgctgatgaatgtcggctctatgagaaaccgcggtgttgaatttgaaattaaatccaccaatatccaaaacaaagactggtattggagcacatccttgaacttcggacacaacaaaaacaccttgttaaaactggacggcgaacagaacgaaatgattgacggcatagccattcatcgtatcggagaggcttatcaatcattctatgcttacgaatacgcaggtgttgatccggaaaccggatcggaaatgttctacattaacggagaagatggaagtcgtgaaaccaccatacattcgaatgaggccaataaggtgattatcggttcgcccgacccgaaactgaccggtggtctgactaactttgtaagttggaaattcatagatttaaactttactctgacttactctttgggcggtcatgcatacgatgctgcaacttggttacagtctaatggcggtacttacaactatgtaggtaatgttccggcatactataagattgaagatacctggaagcaaccgggcgacaacgctaaattgcccctatttgcctatggcaataaaaatacggtttcttcacgttggatgatgcctaccgatcacttacgtttgaaaaacctgaccataggtttcactcttccaagcaacttgtccaaaaaggccggaataagcaaattaagagcttacatttcgggtaataatctgcttacctggaaatccaaagacttgtatgtagatccagaaacccctgttgacggactgtgttacttcgagacacctgcattaagaacaattacatttggtatcgaacttggtttctaattaaaatctttacttagcatatacattatgaagaaaatatataatatcctagcattagcagcagtcacgacagggctttcgtcctgtgtgaataactggctggaccaaactccttccaacggaacgccaacaagttccgccattaccaattataatgatgcccgcacagcaatgtatggtatgtatgatggcctgcaaggcaattccacttacacccagtactatgcagctcgcatgttctactatggagatgtccggggggacgacatgcaggcacgcactcaaggtatgcgcacctcttcttgctatgaaatgcgctataccgcagatgatgccccaaacatgtggaatatacagtacaatgtgataagacgcgccaatcgcttgattgaggctgtagataacaagacaattaccgatgcggaaaattttcaggctgaattggcaaatatctacaatcaggccaaagtaatacgcgccttagtacattttgatttggtaaaagtgtacggcatgccctatacatacgatgaaggtgcttcgcttggagtacctttcgttgacaaaccactggatcgtgatgcacaacccggacgtgacaaggtagccgatgtttatgccaaagttgttgcagacctgaataatgccatcgactcagaagcactgaccgtatccaaaaaagcaggtgaaaaacaaggctatatcgatttatgggcagctaaagctttgctgtgccgagtgtatctatacatgaacaaaaatcaggaagccttcgatttagcaaaagaaatcatcaacgactctccttatgaattatggactcccgaacaatacgctgaggcatgggacaagcaagatccgaaccatacaaaagaaatgatttttgaattgataaacaatggttctgatgactgggccgaccgtgaaggcataggctacttgctgaatgaacaaggatatgccgatgctatctgtacaaaatcatttgttgatatgctgcaaaccgatcctgcagatgtccgtaacgaagttgtgctaccagcaatgtacgacaaagacttgaagaaaacctatggggaaaatccaattttcatcaataagttcccgctgggagcactgggagatatgcgccttgccaacttgccgattttacgtctgtccgaagtttacctgaacgcagccgaagctgctgccaaactgggcggagcagccaaagcagaaggtataaaatatctgaacgatttattggacaaacgcaccaaaactccaacagccaaagtatccgatgctattgctgatgacgaattcctgagcaaagttttgattgaacgccgtaaggaactggttggcgaagggcaacgctttttcgatgccatgcgcaataacgaaacgattgtacgctatagcagtgaggaaaaccaaggctggcactactcattacttaaagaatcacaaagttttgaccgtacgtatacaaaagcattgttgcctattcctgtaagtgaaaccaatgccaacccgactttgaaagcacagcagaatccgggttattaaacaaagcctaaccagtaccggtttgtcataatagcagaaaagacaaaccggtagttaagctttctgatgataaaacataaagcatgatatggtatttcacgctagttataaaaaaggttgcaaacggaagactgttttcctgtttgcaaccttttttcattactgccaaattccggctctcttatttaattacatcaagcaaccttcctttacaatatccgtcaatatcggcttcactccgctaacgaaacattctacggcaatcaccatcaagatgagtcccataaggcgcatcatcacattattaccggtttcccctaataaattgaccaaacgggtggaagccttcaatatcaagaatgtaagaaaataaataagggcaatagtgcctataagcacccctttcatctcaaaggaatgtgcatcttgcatcagtacgattgcattggcaatagcgcccggaccacataacatcggaatacctaaaggagtaatcgaaatatcatccgcataggtcttgatttcttcatctttcaatttcatcggtgtatagcgtgcctgcagcatatcaaaaccaatcttgaaaatgataacgccacccgctattcggaaaccgtttgtcgaaataccgaaaaacttgaagaggaattgcccggcaaagacaaagaccatcaatgtgataaacgagactaatgttgcgcgctttacgatagaacaacgttctttatcggtcataccctgcgtcatagtcagaaaaaccggcattgtgcccaacggattagtcaacgtaaagaaagatgtgaaacacaacaatgcaaaaggaatgagagtttccataatagtatttttagatgttcatcattggaaacaaaagtacaactaatctgtcaatgtcacaaaaaattaaataaatctttcaaatcagtaatctgataggtaggagcaaaaggcaagtcggtacgaccggacaagttgtaaaacacctggtgcatgcctactcccgccgctccgactatatcattttcccaactatctccgatcatcagcgaattattcaactcggactgggttgtcgaaagagcaaaatgaaaaatctcaggccaaggcttcaggattccgatatcatcggaaagaaccacttttttgaaatattcatcaatgcccgacgaacgcattttatgactttggagttctttaaatccatttgaaagaatgtacaaattgtattttcccgaaagatattccagcacttcacgcgcatgtggcatcaatttgcttttggtaggaatcattgtaagagcatctctttcgtaagcctttgccaaagtggagtcacctgctcctacagcctccaaaggataaagataacgttgacggtttaactcttctttcgtgactttaccatctgcatactctgcccataaatccagattgcgacgctgataaagtgaataataatgctcgaacgaatcgaaatagcgatcgtatccatacttccagtacatttcttcataggtatcacgagcattgagagagaacgcccaaagcgtatcgtccaaatcaaaaaaaagatttttataaagcataaaaaagaatactaaaaaggctgtttcaaaagcaggcctacaaacgaaacgcacttttgaaacagccctatcaattatcaatcaagtaactatttcacttgaattaccagatacttggaaacgctccagaattctttcggattagtaatcttcaatgtcaactgatctttatcatctttttccaaggcataagaaccggtaggatgggtagtcagaatatcggcatctttggaatacagtttgatttctttggtagtacgaatatcaacctgggtaaaataatccttattgacatcaccatctttcaagaccgaaccttttttaaataatccggaaccgctcagaattttctggtctttcagttctttcttcgttccgaatacaaaccatgcagtattaagcgctttatcctgttctgccactgtcttggcttttgcctcattctcagcagtcaattcactcttgacagcattcaaatccgtaacggcggcatccaactcctggatacggatattcttagaagccagttcggcctgtaactcttcgatacgctgggttttcgcattcagttcctgtgtcaaagactcaacagctctttttaactgagaagagttggtcttgctgtttttcaacatagattgcagcttggcaatctgctctttgttctcttccatttgcttacggatgaattcaatatcagaggctatctgctgtttagcattcagagaaccctctgcaactgcaccacgctgcaagtctacacggctttctgccgcattgatttgacgaaatccttccgaaatatcattgaaagtgcccatcatttcatccagttcagcattacgctgagtcagttccattaaaagagaatcattctcagctttcaactgatctttgctaccacctgaaaagctgtcacatgaagccataacggctgtacatacaatcaaaactgctaactttttcatacgcttttgttttacgttttgttaatgaagttatttaatcgtctattcctgctactacaatcactatctcaccacgcggttcgttggctgtgaaatgttctatcaatccggtaagagtaccacgtaccgtctcctcatgtatcttggatatttcacgggaaacggacgcctgccgttccgaaccgagatattctgcaaactgcatcagtgcttttaccaaacggtggggagattcatagaaaaccattgtccggcgttcttccgccaaacctttcagacgtgtcatcctacctttcttctgaggaagaaaaccctcaaagcagaacttctcgttgggcaatccggaagccaccaatgccggaacaaaagcagtagcccccggcaggcactgtacttcgataccgttacggacacactcgcgaaccaccagaaaacccggatcggaaatacctggagtaccggcatctgaaatcaacgccacagtctcaccaccctttattctatttacaacactttctactgttttatgttcattaaatttatgatgagactgcatcgcattctttatctcaaaatgcttcagcaatattccggaagtacgcgtgtcttctgccagcaccaaatccgcttccttcaatatgcggatagcgcgaaaagtcatatcttccaaatttcctactggcgtaggcactacataaagttttcccatatccgctacttttttaactgaaatacttcttgagaagttctataaaatcagcagccgcctcattttcttcatccggttgtacagttgacataaatacagacatagcctcatccaaagaggaagccccaccgcaaaggcgcaccacctcattcatacgtgtcgcatctccggcaaacaattcacgggtaaaacgaaacgaatcattcagactgatagcatgttgtaagtccgtagccggcttaatacgttcggcaagaatctgagaagcaggtactgcaatatccgaaacgtgagttgcctcaaccggaacatcagcaaccggttcggaaatcacttccgattcagttgttttctccacaatgtcagaagcaacatgttccaccggagttatcacaaaagtgtcgtccaacagtttggtcagcgcatccaaccgctcctgcatctgatgaatattccttttagcaactattctcagcacagaatttgtatcagtgagcatcgactgtatcaaacatttcaattcctgaacatccagttctatatcattcaataatgcttgcatatccttttcctgtccgtattaatggcacaaatgtagaaataaataatgaaaaaatatccggaagcgaacaaaatcattacttttgcgactgaatataacactcaaagatatggtattattttcggaagaccacatacaagaaaccaaacgcagaggaagaattgaagttatatgcggatccatgttctccggcaagacagaggaactgatacgccgtttgaaacgtgccaaatttgccaagcaacgtgtagaaatatataagccggcaatagacacgcgttactcagaagcagatgtcgtatcgcatgacagcaacatcatatcctctacaccgatagactcatcggcaagcatactgctattcacttccgaaatagacgtagtgggtatcgacgaagcgcaattctttgacgaaggtctgattgatgtatgcaaccagcttgccaacaatggtatacgtgtaatagtagccggattggatatggatttccgcggtaatcctttcggccccatgccggggctgtgcgccattgcagatgaagtttccaaggtgcatgccatttgtgtaaaatgcggacagcttgcttcattctctcatcgtactgtaaaaaatgacaaacaagttctgttgggtgaaacagccgaatacgaacccttgtgccgagagtgttatttacgggcgataaaggaagaccagcaaacagcaagcgattaataaatttaatacaggattctatggaacgtaaaaagattacattcgacagttttatccgcggtgtcattttaggagttatcattatcggcatattgatgcttttgaagcgtttaagcagcgttctattacctttctttatcgcttggcttattgcctatctggtatatcctttggtcacatttttccaatacaagctaaaattaagaaataggattgtttccatattctgcgcattactcacacttctgattgtgggtgccggagctttttatctgttagtaccccctatgatacaagagtgcggcagagtacagactttattggtccaatacttttcgcacggaacatataatagtaatgtccccacctctctttccgattttttacgagataatatcgatgttaaatttataaccgaactattcaataaagagaacctattggatgcgctcaaagaagcagttccccgcctatggtctttattatcggactccgttgacttattattcagcgtattcaccatattcattatcttactatacgttatcttcattttattagactacgaaagcatcgcagaaagttggacgcatctcgtgcctatgaaataccgttctttcgtggtaggcatactaaatgacgtaaaagtaggtatgaacagatacttccgcggacaggcattcgtagccttatgtgtcggcattttattcagcataggctttcttatcatagacttcccattggccataggtctcggtttgttcatcggggcattgaatatggtgccttatcttcaaatcatcggtttggttcctactatcatactggcaatcctgaaagcctccgacacaggcgagaatttttggataatcatcgcctcagccatggcagtattcattgtagtgcaaactatccaagacggattcatcgtgccacgtgttatggggaaaattaccggactaaatcctgctatcattctattatcactttccatatggggttcattaatgggaatgttgggaatgattatcgcactaccgctcacaacgctgatgctctcctactatcaacgtttcattatcaacagagaaaatattcataagacagaatcaactgataatcaaacaaaagaaataaacaactaaaataatgcaaacttttttcgttataagtcttgcatattaaatataaagtccatatctttgcacccgcttaacagcaataaggattgattcgctagctcagcaggtagagcacaacacttttaatgttggggtcttgggttcgagccccaagcggatcacttgaaaatcaagcagttatctaaaaaagatagctgtttttttcttttgtatatactgcgatttgacggctttgatgtaaaccaagatgtaaacggggggtcaacgtaaaccagtaaaccgtatgactgaaacaatcaagtactgtgttacaaatcaaaaacacttagtaatggtgaacatcctctcatgttatgtgtctgtaaagacggaaaacggaagtaccaaagtcttggcgtatccataaaagcagagcaatgggatttcaaggcaaaccagccaaaagccaaatgtccaaatcgtgaaagaataaccattctcataaacgaaaaaatcacagaaatacaaaaggcagctttagacaagagaacactatgcaagggtattggatcagaatattttcaaggatatgcaaaaagtaaataggga

SEQ ID NO: 467 - DNA, 8329 bp, Bacteroides stercoris; identical to SEQ ID NO: 5
  source 1..8329: mol_type = genomic DNA

SEQ ID NO: 468 - DNA, 5731 bp, Bacteroides stercoris
  source 1..5731: mol_type = genomic DNA
ccctcggagagcgcaccaactttagccgaaggcgttcaaagttgatagtgcgctatcaacctgtaagcaggttacctcagcggcgaagataaacaatttccccgaaaataaaaagaagaacgtctccaaactgaatgtgattcaatctggagacgtgagaaagtctatcgacggtttgcggatgataatcctaaaacttttgagaagtggcccgatgtacaaagatgatttttgctattttatgggtgtctcattgataatctttgttttttgacttttgatttgctgatatggtacaggttccattatgacttttcgttttaagacttcatcatatgtaatgaaaaagaaatttcgtccataaccgtttccaaagataacctcaaatggctcaccagtatctttccaaatgcttacttttgctgaaaatggaaaatctaatgattctttgctattatcataaccatatgttacttcataatatgtgcgtccaatatttcggctgatttctgatcgtttatcactactttcaaacttttcttctgtaatagtaggagtgacttctctatagtatcccggacctaaaagtttgataatatcgtttgataatgatattaagtgtttttctttttcactgctgtttaaagcttcgaaattagcttgttgtgccattgcatttatacaaaacattgtacaaattaaaagatataatgctctcataaacaaacctccttttttaatagattctatcaggacgttgggcatattcaccaaacgtctgcattttatattttttatctttgctatcaccgccatatatttttgcatcttcataatcgtataaaataccaggcaactgctgactattggcaaaattaatatcacctattgaaggccctgtttctcttgatacataagatggacagtattgcaatgttgtatgacaatggaaatgagcgcaaactgtattttgaaattcaagagcaggataatcaggctttagttctatagatgcatgagtgccttcgcagttgggtatattgtctcccatttgcatctttccacaatgaattttatctgaggattcatcataatagatataaaagccatattctcttcttttccctttagcagcatagtttttcatttcttcccatgcttcattcatcttttttacgacatcagggtctgttttaattcttgagacattaggaaaggtatgtatagctttaacagacctcgtattcatttctttattgtcttgtacaaattcatcgttttcatttgaacaagaactaaagcctatacaaagcatacagaaagaactgattagcaaaatgtttttcataagccatttgattttagttaactgccataaaattagaaaataattgtttacgttgttctttgcgataggactttaacatagcttttttgaaaactctttagatggcttgaaagccgggacattatgagcagggataaccagagttgtgttctgtccgatatttcgtcctgttttttcagctttacgtttgatgatgaaactaccgaatcctcggagatatacattctttccgtttgacagggaacctttcactgtttccatgaatgcttccactatcattaaaacttcgttccggtctattccggtctgttttgaaatctcttgtactaagtctgcttttgtcattttcgtaatagttttatattggattataattttgattatgcaaaacaatcaagactgtgcattttctatcttttttttcagattctgaatgaaccatcctatattctcctgtggtctgaatccctgtttcgctatgtattggaatgtttcttccagttcttggattgtgtcgttttggaagatgcgttgcagctcgtcgattaactttacattgcttctgatttgccccatgttgaaccccatcttgtttttgagccaatccttagtctctggcctgatggcagcttgcgggtacttcgaaagcagttctttgtgtgttgcttcttctctcttgttctttggtatttcatagaagtagaaagtaaagctatcaacctttctgcctactttgtgctgttcgtaagaaaatgaccaaggagcaaccctatccagttcttctttagcattatcaattacgcatcttttgagagactctaatcttgggtattttgccttgcagccaaacatttctttaaaattctctacggaaatgttccatattttggtatcactccatcttttagcaatctcaaagaaacgcattgagtaggctgatttcaattccatagccacaaccaaatcgaattttgtaaaccctttggtgaagtccaaagctgattgccatacaaatttatgtacagtaaaatatattatcccctcacctggttctctgtcggcagaatttagcaacgcaccaaatgagaatgcatcttttgtctgaaactctattcgcttgcttgttaatgacttgaaagctgccacaacatcatcataacactttccgcctccatcagctttttgttcttttgtcatgaagtgtgtaatcggcaatctaaaggaaacatggtctctagctatgtattctccttcgtgctgttcgaaccattctttgttggcttctctgtattcaaatgcttgttctgctacacgatagagtatgattttctcttgcagagtgtaatcatactttgcagttgtgaaataattgctctgtcttatgtcttttgattgtgcttttactggtcttgccatactttcgattgtttgtttcggttgcaaatataatataaaaaatagatatagcaattaatgcattgatttaattgctatatacgtactatttgttgctatatctaattttttttgacgtactatttgttgctgtatgacgtactatttgttgctatatcatgtttttatgcctatttaacatgatgatatataagaacttatgaatctgttttttttcgtacaaggttaatacaagataataacctaagacaaggttacagaattttagggttgttagagcctaaaattcacgattcgtactttcggaaaaacacaaaagccatggagaaaaagaaaggaaggaaaggtttgaggttaaaaatggatgggacattttttctgcgtgttaaaatatgtgttaatacgttctgatatgtaaatatgtggcatttaaatgggcgcttattgcgcttttaaatagcattgattgttaaataactaaacttataggtttatattggtttcctttggtatctttgcccatgaaaagagtagtatttatgaagtttgtaagagttattggaggttatgaccatttgtgggctgtaaaggagccggacaaggagtttgatgagcttacttcattgtttgaaaaatggaacaatgcggattatctattggattttttcaaagacaacatcgaagacctaaggaagtatttccatatagaaaaagtttcggaagccatacgagacacatttgaggatgcggatgagctggaagaacttatcttggagtttccttatactgaaaatctggacggtttgtttatgcctcttgatgtcacagatgcaagatgtgtggaattgacaagaagaaaagctcgtaattggaacagggataagcacgcaagctggttacggatatatgccatccgtcttgaagccaatgtttatgtggttacgggtggggctataaagctcacacatttgatgcaggataaggagcatacagctatggaattggacaaactgaatagatgcaaagcttttcttaaggctaatggagtttttgacaaagatagtttcgttgatttaaacaaggaggattgaatatgagtagagctattgactttttaaaaaaacatgaaagtatttctccctctcattttgaggaaaatgcgaaatggagaaaggaaaacgaggcttggttggaatggtcacgtaacatcgccttgtctttagtggagtatatggaatccaatggtttaaacagaaacggactggcagagcgtttaggagtatctccacagtatattagtaagattttatccgggaaagtcaatttttcttttaaaagtatcgcagaactggagcaaaaactcaacatcaagctgttggatgttttggaattggcttgattcatttaagaagaagccgtctatgtccccaaacggcttctttgtttttccgaaagtgaaccatatattttgatacggaagtctcacttgctggacacacaaaacagcaagtgagacttctctttgttccgtagtgataaagttggtttgttgacttgttgcttggtttgctggttaacttgtttgatagtaacccctctgccttgcgatgaaaaaccacatgcaaggtgtggttttgtagccacaaaacgcctttcggcagtcgagctgccgaaatcttcagaaactgtattgtgccgttacaggtgcatcccccggttctgcgtccggctgcgttcctgcttttggtactgttccgggccgtactcgaccagcaggtccaggtctttctttccctcctgtatccatgcctttggagtggtgcccggcatctcgtctttggccatgttccagaggtcactggcgtattttttccgctcatccatcgaccgggcattgcgcaaggccttctcgatggaggcgatgtgtgcggttgtgaaggtacgtatcattgtggtgcaccgcttgacaatcgcctcgatggcagctgctgcatccggccagagggaaaagaacctgtttctccagcgttcggcattggcttcagccgctttctcccaccgttccgcccgttgcttatcctgctggaggccgtacactttgctttcgtatcggcttctgaccgaatttaaggcttcctgagcctctttctttatcctggttatctctgcttcctttttggccagttcgtcctttaaacgtaagatttcaccctttaaaccctcttctttccgcttggtcttgcccgtgattgcatcgacgacgtgcgcacctacggtcttgaaggtgtctatcgtggcttctttggctgctttggtcgtgctgagttccgccacttcctccgtcagttgttcgatttgtgaggttttggcctctatcttgtactggagtgcatcgacatgcttccggctgctcgcctgcccccgttccatgcccaggcattcggccaggatggtctgcatccgggcgcagtccacgttggagagcctgacattccggccttgctcgttgtacattctccagacgatgtgggcatggaggttgggcttccattgtctggctgccgtgtgtccctcgtcccggtggacgtggatctgcagcggcaccagcccgaactccttttggcaccgggtgcagaactccttcaggtctgacagggtggtggtgtcgctgatgaccgccaccccttccttgagcgggatggcgttcttctggagctttcgtccggtgtgcttcttcacgtcctgctggatgcgcttcagctctgcggccaggctttgcccggtatagctgtatgattcgttgagatgcgtcaggtcctgacggatgtaggagagctgccgctcgcgcttgttgtgcagctcggatcctgcggtgtcgcaggccttgatgtggatggatgtcttcgccatggtcgtacggattgggttgggggcggcatggggtcggcagggggcttgccccttgcc

SEQ ID NO: 469 - DNA, 4148 bp, Bacteroides stercoris; identical to SEQ ID NO: 7
  source 1..4148: mol_type = genomic DNA

SEQ ID NO: 470 - DNA, 2877 bp, Bacteroides stercoris
  source 1..2877: mol_type = genomic DNA
gtaatagtttcttttaatgtgttatttatgaaactttcactttcttactatgaaagtcccactttcatagtatgaaagtcgcctatattgattatcaataacttatgctatgtttctttcttaagctcttaaatacccccaaaaatgccattttttagcttattttctttcatcttctgcactttcaaaaattacccaaaaaatgaaactaaaagagccccttcaaaagaggggctctccacgtccacgtttgggtaagttttgcgttttaatgcaaccttaaaatttcagttcttatgaaaaaaaccttctgttgttgaaatgctcatccccaaaatagaaaaacaaccccaaaaaagcaaagagaaacaagggtttaacattgagcaacactccattgagtgagtgctgccgtttggtcgctcccccttgggggacgggagggtgttaaagcgaatagcctttgttatgtctgatatacctttcgggatgcagctttttgtgctgttcctcgataacccctctaagctgtgcattctcttttcgcaagcggtctgccttttcttcggcttgcagcttcgagttctggaagtattttagaactttctggctttgtttctccgcttcgtgcttgtaatgctctctcatttgggtaaaatcctcgtaaatcgccttattttgcttctcagcccatttttcacgcccgattaatggcggtgtgccgatttggggtgctcttgtttcgtaattcagctccatactgttactcggataaatgagccgttcctctatcctgccgtaatactcccttacactgtcatgggtggcggtgctgcctttaatacccctctgaagcccgaatttgttctgcatgacttttccgtaacagtcctgcaactccgacagcttgcgtctgtcacccatgacctctttggcggaaagtctgccgtccacggttaacggcacaacgacacaatgaatgtgcggtgtccgctcgtccatatgtagggtgaagtccacaacgtttctccccccgaaccgttcgctgacgaacctgtagttctcgttcatccattgagtgagcctttcgggattctccccgatagctgtcatttcctcgtgacttcctgtaagaactacattcaggtgggtaacggcatccttgcggatggctgtctttcccttgtaaccctcctgtatgcgtctgttgattctttcctgtaatgaccttcggttcttgaaattgtcatagacatagactttcccattctcgcccaaatggtaaaatagatttttttccgaaagtttcggatctgcattgaggactttctttgtccggtctatatggctgcccaatccgccggctttaccggctgttcctttttcgatgtgaagtactgcgaatcccatttcttttccctattgtttttttggtttagtaatgcaatcaaagagggcggaagccctcccctttcggcttgtccgaaagcccacacttcggaacgaagtatagtgggctatacttccattaacgaaagcgcacaacaaaagtaggcaaaacgcttggaaattccaaatgctttgcctacctttgctgctgaccaaacggtagccgaccgatacgggagagctgctgacattaaaaagccgctggagtgaattgacggattcccgacatctccagcggcttgatgtatgtaagggtagaacggcagggtttgaacctgcaacccctcctctaaaaattgagtgctctgtccagttgagctacgtttacccttagttccttattttgctttttgggcttctttcttgtcttggtggttgaagtaaaccactccgacaatggctattactgaaacaagtccaaacattaccaatgctcccatgtttattctcctttctttttgtctttaacaagccaaagacctgctaaaagggttactactattgacaacgaacctcccacgtatattacccacttttcttgcacatccccgaaaattgaagaaagcacgactgccgtagttatatacttggcaatgtccattagccattttcctaattcttttttcatactgcaaatataataatttaattggaattattgtttatccccctcccgtcccccaaagggggagcgaccaaacggcagcactcactcaatggagtgttgctgttctttagtcctcaaaaggcagttgtggtaaatctccttgttctttcatcacatctattgtacctttcagctttgttgatgtcgtcttatattgtggataattttcattaatgtaagttgttgcgaatgttaccctatcaccgttaaatacgcacatgggatttatgtagtattcaatatccgctctacctcttgctattatttcggcactgcaaagctcgcctaaagctctaaaaatggatacttctgaataccctgtttcttccttgcattcgtccataaaaaacataaagctgtcttgattaggttttagttggccaaggatatatttaaagactttgattgatgcaggctttaaatcaaaaaaagccttgaatcctgctaaaaagaacttcgcaaaactttctgtatctacggctttatttcgtataaatacagaattaccaagaatttccccattaccgtcaactgcttttagaatggctgattcatctttatttgttcccttaactgatttagaaacaagtgcactccctatattaactaatgcttgttttgcaaagggattttctttgttaagctcgaaatctgatagtttacgctttgtcatactctactttcattttcatggtgatttttgatagtaacagtaacattgaatgttattattactttcacaaagatagtaaaaaatgaaa

SEQ ID NO: 471 - DNA, 2783 bp, Bacteroides stercoris
  source 1..2783: mol_type = genomic DNA
actttagggaaaaagagttggactatgttcgtccggaacttagtcatttgaatgaaagctgggttggagatagcatctcccatcggctggagagtgcgaaacagagatatttcgatacggttgggcagaagatgcagactaaagcagcacccatacgggagggggtaatagtaatcaagcaagaaaccaccatgcaggaactccagcaattcgctgcggtctgcaaggaacgtttcggtattgaagcgtttcaaatccatatacacaaggacgaaggatacatgaacgcaaagcaatggacacctaaccttcacgcccatgtagttttcgattggacgcagccgaacgggaagagtgtgcgtttatcgcgtgatgacatggcagaactccaaaccatagcatctgaagcactgggcatggaacgtggtgtttcttctgatcgcaaacacttatcggctatgcagtacaagaccgaatgtgcgaaagaacagcttcaggaactatccaacgatatatccagtgcgttagacaagcacaaggacgtgcaaaaccagcttcttcagcttcagaaagaactacgttccattgaaacaaagaaaaacgtccaaaaactcatttctaaggcttcagagaagttttacggcttgatagggaaaacggttaacgatagggaaaaagatgccttaaaagccaaaataaaggctttagagggggaaaatgaacagctatccgatagactgggaaaggctatacttgaaaaagagcgaaacggcacaaaggtattcaaagccgagaacgacaaggagtattatagacagcaaatggacaatgcaaggacaaccagtaaccgactaagaacggagaaccaagaactaaagaccgaaaccaaggaattgaaaaaagaacttggtaagatgaaagacttgttcaattccgaacaactggaggctttaaggcatcatttcccaaacatatcaaaagctatggaagaggggaaagacctactcaagcaaatcaccagaagcagaggtttcggcatgggtatgtaaccccccccgcccccaaagggggagcgaccaaacggcagcttcactcaatggagtgttacgccgttcgggttcggaagaaattttgcagggttcgaaaaacggttgtgtgcttattcgaaaaaaagtttatggtgtgggcgctcgtcgggacgggtggtcccgccccttgccgctgggcgctccccgaccgatgattttttaagtagttgattatatgccgtttttagggtataataagaacttaagaaatagaataagttaagtagttgatactcaatatagggtattttccatattggaaaatctgattttccatattagaaagtcactctttcctattagatgttaaaaaggaaaatatattttgcttttttattgtattaatggaaatttaaatattcctttgtggaaaatcaaattatactttttcaccgatatatagaaagtcaaatttgcctaaatagaatgtttatggaaaataagaaagtactcaaattaaccgattttcaaaaaaacgaagaaaacccctttatgaaacaagcaattgaaggaattgaaaatcacgttgttaagaaatacaaaagtagtacgggaagtgataaaaaagctgtagttgctgttgctgatacagatacaggagaagtattcaaaacctcgtttatccgacaaatagaagtagatgaagagcaatttgcaaaactataccttgcgaattttgccgcttttttcaatctatcacaatcagctattcgggttttcgggtatattctaacttgcatgaagcctaagaatgatatgataattttcgataggcgaaaatgcttagaatacacccaatacaaatcagacaaagccatatacaaaggattggcagagctcgtacaaagtgaaatcatagcaagaggtccaaacgaatataattggttcattaatccgttgattgtctttaatggggatagggtttcatttacaaaaacatacgttcggaaaaagactttagctgcccaaaagaaagaagaagcagagaaacgacagttatcacttggttttgatgaactgtaacactccattgagtgaagctgccgtttggtcgctccccctttgggggcggggggggatagataaagttcctctatgtaaagttataatgggggatgaaaggcaaggttcgctaaccttaccccgattgtttatgcttcccagcattcaatctatccccgtttatgggtttctctttcaccctacaaagataacctcatgggggaaaaatgtccaagaatatggggtaaaaactatcaagtcggtagaaaataagtatctttgaagtacatttttagtagaggtattggtatgcctagacgaagcagataggcaaaaataaagccgctggggatgtcggatgtccgtcaattaactccagcggcttgtattttggtaactctcccgtatcggtcagctaccgtttggtcagcaacaaaggtagtactttattgtcgcaaatccaaatgttttcccctttatttgtgcatttacaaaacattcactaacttcgcacctatgcagtatggtgatagcacactagcaccctaaagggtacgtgtgtaaggggacaagcccccttaaccccctgtcagccggctgtcaccggctgttatcgattgtcacaaaaatgttaacttatgggagcaacaagtattcatgtacaagcagtgaagccggggagcgagattcaca

SEQ ID NO: 472 - DNA, 2648 bp, Bacteroides stercoris
  source 1..2648: mol_type = genomic DNA
gtaagcattcagcaaaccccgtatttccccctctgaaagttcttcttagttttgcgtgaatttaaaacgtgaaacaatgaagaacttgacattagaagaatttaaaaagattcatgaagaatggaagtcaacgggactttccattcgtgactattgtcacaacaccggctttgaagaaagcaagttttattattggcgtaagaaacttacagaagccatgctgccgcaggcgggcggttttgttccggtgaacatgtttgaccaaaacggcaagctgggcatgtctgtcaccggctccgctaaagaagcaacggatcatgtaccctgtgaagtggtctatcccaatggtgtcgtcttgcgcatccagagtgaattgtctctggaagcgctccgttcgttaatcctcttatgtcggtagcccatgttcaacctcaatgattcaaaccgatttttcctgtacccgtatcctacggacatgcgcaaaagcttctattcgctgagcggcattgtgaccaacctcatgggcatgaacgttcaggacggtgatgcctatatctttatcaacaaatcattgaccgggttgaagattctccatgccgagtacggtggtctggttatctacaacatgaaacttgaacggggagccttcaaactccccgatattgacaccgatgaccctgccacttcaaagggtataaaatgggctgacctgatgatgatcgtacaagggatatccccttcggaagttcatcggtgcagtcgatgggagcccaagaaaaagtagtgttccaagtcgttttttatggtctgaaaatgaggtaaaatggtctgattttcgtatctttgcagtgtaagaaaagaacagaaaaccatgtcagaaacctccaaccagaaagccctcatcgagcagctgctcagcgaccgtgatgccgagttccggcgggcggtgaaagcggaacggcagctgaaggaattctcggacgtcaaaaggatgcaggccgactacgaagccagactggctgaaaaggagaaggccatccaggagcgcgaccgggctttggagtccaaggaaagccggatagcacaacttgaacagaaacttctttatctggagcgcaagatgtggggtgccatgtccgagaagcggcgtatccccgatgaccccaaccagctcaaactggactttgacctgctggaaatgaccccggaagaggaagagacggtccgcaaggctgtcgaggaggtgaatgaatacaggaaggtgacggtcaaggaacatgaaaaacgggttccggtccgtcagaaactgccggacaacctccgccgcgtggaagagcacatctatcctgacggctatctggggcatgaagacgaatggatcctgttcgaggatgccgaaacgtccgaacacctggaactccagcctgccgaactgtacgtccgggtgaccatccggcataaaggcatgcgcaaggagacgaaggaaatcgttacagcgcccgtacagaatgaacccattgccaagagctatgccagtgcatcgctgctgaccgacctgatggtcgggaagtatgtggaccatctccctttctaccgtcaggtacagatgttcaaacggttgggagtcagcatacccccttccacgatcgaagtctggttccacgatgtggccgacctgatgcggccagcctactaccggttgagggaactcgtcctgtccaccgattacatccagtccgatgaaacgacggttcccatcatcgacaacgagaagcaccggacggtaaaaggttacctgtggctggtacggagcatggtcaacagtctggtgttcttcgcctataatgaaggttcccggggagccaaggtggtcctgcagctcttcaaggattatcagggagccatacagacagacggctatgccggatacaacatcctggaaaaacaggaaggcataacgacattgggatgctgggtacatacccgaaggtactttgacagggctttaacccatgacaaggcgagggcggaatacgctttggcccagattggcatgctgtatgatgtggagagcatggcagacgaccagcatatggataccctccagcgcatggagctgaggaagcggcttgcctatcccatcatacgcgcttttgagaagtggtgtatctgtgagcagggaaatgtgcttccgaagagtcccataggaaaagccatcggctacttcctgaacaactctcgccggttggtgaggtatacgatggacggaaggtatctcccagacacgaacctgatagagaacagtgtgcgacccgtagctgtcggacgcaagaattatctcttctgcggcaatcacgacgctgctgaagatgctgccgtcatctactccctgatgggatgctgcaaggcagcagacgtggacttcaagcagtggatgaattattttctgaaccatgtccatgaatatgacagtgactactccaaggatctggtaaatctgttgccacactctttaaagaaacaaggtatcatttaagaatctcgtaaaaactaagagatgtctcgtaaaaatagggactttttaagagaaaagtcggaatttttaagaggcatctctttatgtttatagaccttgcaagacggggttt

SEQ ID NO: 473 - DNA, 2419 bp, Bacteroides stercoris
  source 1..2419: mol_type = genomic DNA
ctcataaagatataagttgctaaaaataagagttttataagtgacagttaagttaccattcagagcaaaagtatttacacatatcattctggccatatctaataatcgaattatattaccaaagtgctacctataatctataataactgttgattattagcgctttgtatggacgactgttggataataatcatatcataaatatacttattgctttttgaaataacattttgtaagcaaaaaagtattggtagcttaagtcttccgtttataacttgaactcggcctctctatcaagtttaaaatgaaaatcatctgttatgctatcatactataggggatatacttctgatttcaagcatattaatccgtataaaacaggcgtgatagataaaattatttacaactatctatcacgccacacatcgccttaaaaatgggctaacccctatgtgtattcacacctgattgcacggaataatttattggttatcggtgtaaaacttttagttttatatggtaaaactaaaagttccagcattacaaaacaacttgcttactacttattaaagctgttatctgttttttttttgataccaagtgctgcttgctttattttttccaagtcatggacaatcgtcatatccataatattggtatacacttgtgtcgtttttacgcttttatgaccaagcagcttttgtacagtagtgatatttacaccattatatataagtaaagttgcattggtgtgacgggctgtgtgaaatgaaatcttttttgataaccctgccaattttgcaatgattatcaggtctttattaatatttgagttatctcttaagcggaaaaaatcctccagattattgcggtatttattaaggattacaattcctttgcctgcaaaaaggagataaaggggtaaccgcacttctgttccggtctttacagatttatatataagccacgtttcctgatttatatctacaatgtttttctttgataaatttgtaaaatcagagtatcgcattcctgcataacagcagaacagaaaagcatccaaggacttttgcagtttcatatgcttgtccgtcaggctcaaacgttccaattgttccagttcttctggtactaaatgggtgtgtttgttttccacggtttttattttatacttcctgaaagcatatttctggatttcaatatattctttattaatagcaatatttatgtggcgttttaaatgtttcatatgtttcgcaatggtattggtatgatatcctttctgttgcaggaagtactcaaaagatgaaacaaactcgaatgtcaaatcggaaaatactatatcccttttgaattcttgcagcaatagaagagtagaaagatgattgcgtttggtgctgtcctttaaagacgaattcgaaacctcttgcttaaagaaagatataaatgaagaattgttctctctggtagctaaagcatcctttaataattccaatgatatacgtttgccctgctgccataattccaattcttttttctctattgctgcgacaaattcgtaaatcaggcggttgagagcatctgcattagggtggttttttacaactagtttttttgcatcccattgttccggtttcagatagactttggttgaaaagtatttcttctttctgtccaaataagcttctacttgtaccagtgccattcctcttttgttcagacatttctttctgttgtacacaagactgtaaataattttattcatctcaagttattttgattaatactataaacaaataagatgatattctgtgcaaaacagggtttgaataagaattaatatctgcaaaaaaagactctttctttgacggtctgttctttgaagtcactcaaaagattcaagatatcttgctttatcggatgaactagcgtaaatatgagagcgtttttaactattttattttaaaatatatatattcggattaataatagaacaaaatgattaaaacatagtggtagtaaacattaccattttaaggttctataattgcataaaacatgctattcagcataaaataatcgaaattcttaacagattgatagatttacaaggttttttcaataaaatagttgtgtgtttcatatttattaatatatttgcattttgttagagtaaagaaacaattaatgtaaagttaaactttaagagagaatttatgaaaagaaaattaatgctgttattggcctgcctttttgtgggtataggtctggtaactgcccaaacacagaaagtcacaggtgttgtgatttctgaagaagatgggcagccagttattggagcttctgtattggtaaaaggtacgcaaatcggtgctattaccaatgtagatggtgattttacattactgaatgtaccaag

SEQ ID NO: 474 - DNA, 1594 bp, Bacteroides stercoris
  source 1..1594: mol_type = genomic DNA
cctcaaatccgcaactacgcgcctaatatgatacagaagcgaaaagaatctgcatcgttagtaaaaagggggcacagtgcatcgaatgtcaccataaagacatataaatgccccttaccccaccatgcgacttgaggcaatacgcaaaatcacgactataagttgtcggtgttatccaaagtcattctggaacacattggcataagcattgttgcatgaatagatattcagcacatacttccttgatgtcctgacccatttggctggcacagagatgaacttaaagacaaacgtcttgatgcggcttgttgctttgagtccgaacctcttcacgtcaagcctcgccatgatgaatttatagaagttgcgtatgagtgccataagcagaagaaacaccgtgttttctcccataaaggattttggaagcctgttccagccgaatccgttattcatatcatcgaagatgcgttccttccctccacggaggttatagaattcgacaatctctttctcggaagactcgtagtcatttgtaaggatgcagcggtaggtgtattctccttcccacaggtcgagttcgccgtctatccgcttctgtctttgaatcacaagacggtatgccttccctttccatttctcgatgagaatggaggccagctcaaactcaatgccgcccaattccactttcttccaacctctgagggcaaagatgtcattgtagagcgaactgcatcggttagcacggatatagaaggtcttgcagtgtttagcaatctcttccactatctcttcagaacacgagccgcaatcagctctgaaacggttgataataagcttgttttgttcaaacctttcaaagaacctcttcagcgtgtccttctggtggaaacggacatttgtgttgccgtcgctgttctcaatgccgacaatcaagttgccaataaccgccacgccagggcgataaccaaggaacttcttgtatgtaggcttcgcatcaaacttctcagcctctatgaactggtggtcgaagtcaacgtcatacccctcgccctctttcagctgccctgtggacaataggcaattgaggagcagtgtattcagcttgtctgccgtgttgaagtcgtaggtcttgccagtgtcggatgtgtaggaaatgttatcctgggtcagttcctttatggctctaagaatcgtgtcggcactgcatgtgcgaagtgtcggatgaagcgaaaggtggtacatcagatgagtggtgacatcctcgatgcatgagccgccacaaaaataaacgctcataagcgaacggatgatttcgctgtattgataaccatacagcctgcatctcataccgagggttgagtcgattacagatgagagtctggagtcaaattgctccattattgaaaatattcctccaaaaggagtgagtttctcggatttaattgctacctttgccatgtctgtcgggtttgatacatattttgatttgcaacactaagataggtgaaaaatctgacatggcaaattcctgagcaactttttgttgctcaggtacttaaaaagttatatttgtaatagtgttgcggaattaagg

SEQ ID NO: 475 - DNA, 1459 bp, Bacteroides stercoris
  source 1..1459: mol_type = genomic DNA
tatatattaattttaaactaaatccagttaatttcttaaccttgccagtcgttttaagagataaatcttattattaacaaaggtgataaagtattttgtgtacttcacacgtaacaaagatattatattattcaatatcaagaacacttctttgcatttttttaatcttatacttttaaatttgcaaagacagtctttatataccttatatattagagtttaaggttcttctatatttaaagaatgaaattctatcagtccattcatcggagtttcttcaattacgtcgagttcaattccaaactcaccggcaacttctcttaagatgtccgcatagctataggctaatgagccaacaaatctgatgggataattcttatagtcgtactgacagacattacgagtgaaaaatcctcttaaattattagttatcagttcaaatacatagtcatcgtttgtatagtctgccaagaagtaagaaattgttgagaggaaacggtttgggaaaggacggttatataccgattccatcacttcattagaactgatacgaaatttttcaaaaaaatcggccattacatccttaggtgccaagccttttaacacatcagacagaaacattttgcctaatacagctccactgccttcatcgcccaggatataaccacctgccttgacgttcttaaccactattttcccgtcataaaagcatgaattagagcctgttcccaagatacaggcaatgccggcttcacatttaaacagaccgcgtgccgctgcaagcaggtcactttcaacctgaataggggtcttgaattgtgctactaaagatgcacccaatatattctttttttcataagaggtacatccggctccataataatatacttgttccaatttctttttgaaaaaaatatcgggcaatcctaaacgtacactccggctaatttctcttcttgtttgaaaaaaaggattcaatccctcggtaaaaacacgctgtatcaagtggttgtcttcaaccagtgcccattcagttcttgtagaaccactttccgcaatcagtttcatagctaattagttttagaattgaatacaaatatatagttatttttaatattcctgcgataattcttcaaaaagtttacttcatggttcatagttcgtatccgtcgttgtaagttgtcctttctgaataaaatatttgtaaggtgataactgttggtacatctgctgtaaataagtagttgcttgtttatttttaattcgttagacagttgttgccctttcgttagactaaggtttaacgaaagggcaacaactgtctaacgaaagagtaacggccgtttaacgaattactatttgcagccgtaaagagtaaaggatatgaaaagatatgcaaaaagccactattcggacacttaatcttttctgataccacactgaaaataaaatgttccgc

SEQ ID NO: 476 - DNA, 1325 bp, Bacteroides stercoris
  source 1..1325: mol_type = genomic DNA
cattagtgtcccgttaaaatgggacgagttaaacaattaatcaaaaagccccggaatcaggggatcatttagatctttgacatcattgaaattagtcttgtcgaacaggtcacgcaagtgggttttgtcagtcaatgatatgctgagaatttgtaaaacttcataggttgaacgtttcaacttcatatcatgttggacaatagccacaagacagtacgtgataatagccacactgatttgtatgcgaacagcgttctctgttgtgccccagaatttctttatcttgagatgctgcttgagccatttgaagaacagctcgattaaccatcttttcttataaagatcggcgacatccagtgcagaaagttgttttgcattcgtcaaaaaagtgaactcacggtcatcctcttcgtcgtaatatcggacgagtctgaatgactcaggatattttttctcggagagatatccggtcagtttcacttccgcatctgtcattatgttctttggcattcttcgcttccatctgactgtcttatactttaagttcgtcttggctctgacaacaaagaaagagtctgtaagatgtatcctatagagttctttaaaggagtcataagccctgtcgaatatataataagcatttggttcataatggattgaagacattgctgtggaatcatgctttgatgcagtagttacagtatagaaggcaggaacttgtgcttcaatgtcgtataagacatgagctttcacccctcctttcttgcttcggaactttgcccatgggaatgttgcaagacacaacggaatcgttgttgaatcaaacgcatatttctttccggaaatgtcaaggatgttggtcgtccgcttctcgcaggcttccttcatcatatagaatgcaaagtcttcgaagattctgtaatcacggttctggttcgctgtcgcaagagttgtcttggctatcggttcacgacctaaaccaagatgatattgcttggccctatgcgcctcgaaagcaacgactaagtctcgcaggctctcacggttactcagttgtccaaacatcatcgcgagcatctgattccagcaagtgaaatgtttcacatatctgttgccatcatacttgcgaacatagttgttgaactgagtcctgttcagaaaagcggttaattgagagaatacgtatttgtcttggaacatagcagccatttgtattagactgcaaagttgcaaaatcaagtccgtttcatttcaaaaaaccgtgtaattgactatatttcaataatttcaaagaactatttatccacttttacgggacagtagtg

SEQ ID NO: 477 - DNA, 1096 bp, Bacteroides stercoris
  source 1..1096: mol_type = genomic DNA
gtatatcttattaatttagtatttttgtaagcatgagtttttcatatgaaagttaaatttaaaatgtaaattatgccgctaaaaataaatgtgccttattccgaaaaagatttggcaaaagaaaaaggtgctttttgggataaagataataagacatggtttgttcccgattataaagacatcaatttattttctcaatggattgacacagataaggtatcaataatcgcaaaagcacctttctggataggggtaactcaaaaaacttgttggaagtgtggcggtatgattgacgtgatagcttttgcatctaataaattttggatatatgaatattcagatgatgatgaggcattacaagaatggtatctccaagattatttttcttttttctatatgcctggttatatagagaaagaaattttagatattgtatgttcacgttttcctacttttaaactgggattttctaaaactgttaatggaaagtattgggagaatcattgtgagcattgtaatgctctgcaaggtgactttttcatgcatgatgaacccggtggagagttttctcctattgacatggatggttacaaagctataactttaatagagtttccatataaatttgatttaccaataactgcatcttattcttgggcaagtaatgaaaaagacgttttaaggtattgtccgaaaacgcagtggtaatagccatatccttatcatatgtttttttgttgtatatcttgttttgaatttaataggaaatgtttcttttgtagaagatttagaaaacattgtttttcggaatttaattttaatcattgacttttccagtgaagtgtttagtctgtgcaagtctttggataaaaatacgctcggaatgaaatgtagaggaagatttttattcaaaccgaaggtttggacttaaacaggctaaatacagaacttatctttgtcaatgcttcatattgagttctggaaaacttactataaaagaaaaggattgagaaaatgaaattcattcttcccaatcctttttcaatattagctactatctttattatatagccaattccgacaggcagctatttac

SEQ ID NO: 478 - DNA, 668 bp, Bacteroides stercoris
  source 1..668: mol_type = genomic DNA
ctgcctttcccgcggagaattatataccgtgttgataaacaaggagagaaaaggccgttcgggcagtcttatcgccgttgtgaaaggaacagatgtaaagaccgtgacctccgtactgctccgtctttcccgccgcagacgctttcaggtcagggagataaccatggatatggctccgaacatggagcagatcgcccgcctctgttttcccgccgcacgccgcgtcacagaccgtttccatgtgcagaaactcgcttatgaggcggttcaggatatgcgcgttaaagcacgttgggaggctttggacgaagaatccgttcagatcgcccatgccaaagcctgcgggaagatatatcatgcgccggtctttgaaaacggtgattcacgcaaacagcttctttcgagaagcatttacctgttatataagaaggaatccttgtggacggaatcacagcgcgtacgcgccggcatcctgttccgggagtatcccgatattaagaaagcatactacctctccatgaggctcggactgatataccaccaatgcaggtacaaggatgcggcattgacgcatcttgcccgctggtatgacgaggtggaaaaatcagggtttcttgctttcggaagagtggcacgttccgtacagatgcattaccgggaaataatca

SEQ ID NO: 479 - DNA, 592 bp, Bacteroides stercoris
  source 1..592: mol_type = genomic DNA
acttcatccagtcccacataaacaccgatgttcttctcgaaaagaagccattcttcggcatgaggaagctgctcccaacagagataaccgctcaggtgattccggtattgccgctcgagcagttccccgtcgaccccgaacagcgttcccaacagcctgcagcccaccggcagcttatcaatataattcttttaaaaaagacgcaaattcatgcgtcatacggctaccaccggcaaccagtttccagtcacggctcacgtaacggttctcatccttgacaacccacctgcgccggcgcacgttcagaaaaagcttcttgccgcgtatggggaaatcctgaaccacaacaggttcgtaaaaacccttgctctcaactttcattcctgcgtattctttaggaacttcattcttttcttctaaataaatcactatttccgatgcgctttcctttacgtccgagatgatgaaataatccaatgtcccttcaggaagaaggagacggtagccgttgttgtccataagatttctgagttagttttatgcaaagataggatttttacaaatattacccctcaggtttttacattgaccc

SEQ ID NO: 480 - DNA, 343 bp, Bacteroides stercoris
  source 1..343: mol_type = genomic DNA
gatttatctacttcatcataccaccttgccagccttgtcaaagcaatatccttaaacttacactgatgatagattaagcctaaccgcatagacagataatatcctttctttatatcgggatattccttgaaaagaatttcagcccgtattctttgagactgagtccataaggattccttcttgtaaagcagataaatacttctcgctaacaactgctttcttgtatctccattagcgaaaacaggtgcatgatacatctttccacaggcctttgcataagcaatctgagtggactcttcatccaaagcctcccagcgagcttttacacgcatctcctgcacag

SEQ ID NO: 481 - DNA, 288 bp, Bacteroides stercoris
  source 1..288: mol_type = genomic DNA
ctatccgatcagttgcaagctcttaggtgttttatatggagttgacggggatttattggagcgtcaataccgtaaccatctaagtggttatctccattgggaccaacttgttcatgcagaggattggctactattcgaaaagaatatcggtgcttatatctgtattgatgaggtagccctctcgcgtggggaactctatactgtactgaccaataaagaagctcacggtggtaaaggtagtatgattgccatcattaaaggtacggacgttcatacggtcacttctgt

SEQ ID NO: 482 - DNA, 212 bp, Bacteroides stercoris
  source 1..212: mol_type = genomic DNA
gtatcctgatctgtatacttctcaggaacgatatttttctcctcaaggtagatcacaacttcatttacgctttccttcacatcaacaagatcaaagtaatctaaagtgccttcaggaagaagaaggcgataaccgtttaattccataagctatgaatttggagacaaagataacaatttataaatttacccctcaggtttttacattgaccc

SEQ ID NO: 483 - DNA, 189 bp, Bacteroides stercoris
  source 1..189: mol_type = genomic DNA
tgagagtaaaggcttttatgctcctgttattgttcaggattttcctcttcgtggcaagaaggtcttccttaatattcgtcgtcgtcgctggctcttaaagaagcataatgagtatatctcccgtaactggcgtatggtggctgaaggtactcgtatgacgcaggattttgcgtcttttttaaaagaact

SEQ ID NO: 484 - DNA, 147 bp, Bacteroides stercoris
  source 1..147: mol_type = genomic DNA
ttcataagctaacttctgtacgtgaaagcgatcggtaacacgtttggccgcaggaaagcagatgcgtgcaatctgctccatgttaggagccatatccaaggttatctcgcgcacttggtaacggcggcgacgggagagcttaagcag

SEQ ID NO: 485 - DNA, 137 bp, Bacteroides stercoris
  source 1..137: mol_type = genomic DNA
aactgtgctctaaatgctttgattttagcattgaatgactctgctgcggcattggttgccctcctttcaaagaaattgattatatccagataatgtgtttgtatagaacgtgcgacccttccaaaggtgaggaaccc

SEQ ID NO: 486 - DNA, 135 bp, Bacteroides stercoris
  source 1..135: mol_type = genomic DNA
gggtcaatgtaaaaacctgaggggtaaatttataaattgttatctttgtctccaaattcatagcttatggagttaaacggttatcgccttcttcttcctgaaggcactttagactactttgatcttgttgatgtg

SEQ ID NO: 487 - DNA, 134 bp, Bacteroides stercoris
  source 1..134: mol_type = genomic DNA
acttctttgacagacgttcaacaaacgctgcttccgaatcgttcaatgcaaaaataaaggagttccgcacacaattcagaggagtaaaggacagagctttcttcctgttcagactggcgaaaatttatgcataa
